United States Patent Application Publication US 2026/0275365 A1, published September 17, 2026 (application 19/168,060).

The application's sequence listing, which the Patent Office published only in electronic form, follows.

SEQUENCE LISTING (171 sequences)

SEQ ID NO: 1 - DNA, 28390 bp, synthetic construct
  source 1..28390: mol_type = other DNA
gacccgcgaggtttctcgcttcaattgaaatcataaagaagcaattgaaaattttcgagtaaccgaccctcccgataatcttcaacataaaacaacgcacttcttccaacgggagaggcggtgttagttgcgagctaaggagataaggtatgcttaagagatcggggtcgctttctcttgccttgatggtctccttctgttcgtcgagccttgccacgccactctcatctgctgagtttgaccatgttgctcgcaagtgtgccccatcagttgcgacatctacgcttgcggcgatagctaaggtggagagtcgctttgatcctttagcgattcatgacaacacgaccggcgaaacgcttcactggcaagatcacagccaagcaacccaagtcgtcaggcaccgtctcgatgcacggcattcgctggatgttggcctcatgcaaataaactctcgaaatttttctatgctcggtctgacacctgacggtgcgctccaggcgtgcacatcattatctgccgctgcaaacatgctgaaaagtcgttatgcaggcggcgaaacgattgacgagaagcaatttgcgcttcgtcgggcgatctccgcttacaacaccggtaatttcatcggcggttttgcaaacggctacgtgcgaaaagttgaaacagctgctcaatcgctggtgcccgcgttaatcgagcctccaaaagacgatcacgaggcgctaaaatccgaagagacgtgggatgtttgggggtcatatcagcgccgctcgcaggaggatggcgctggcggtttaatcgctccgccaccgccacaccaggacaacggcaaatccgcagacgacaatcaagtcttattcgacttatactaaggaggtgcgcattgatgcgatgctttgagagataccgtttacatctaaatcgcctctcgctctcgaatgcgatgatgcgcgtgatatcgagctgcgccccaagcttgtgcggtgcaattgcatggagcatttcctcatccggacccgccgcagcgcaatctgcgggtggcggcactgaccccgccacaatggttaacaatatatgcacgtttatccttggtccgttcggccagtcactcgctgttctcggcattgtcgctatcgggatctcctggatgttcgggcgggcttcgcttgggctggttgccggcgtcgtcggcggcattgttatcatgtttggggcgagcttcctcggccaaacgctcactggcggtagttgatggctgatcgtttggaagaatcgaccctttacctcgcagccacacggcccgcattgtttcttggggtgccactgacattggcagggttattcatgatgttcgccggctttgtcatcgttatcgttcagaacccgctctacgaagtcgttctcgtgccgttatggtttgcagcccggctcatcgtggagcgagactacaatgcggcgagcgtcgtcctgctatttttgcggaccgcgggaagaagcattgatagtgcagtttgggggggcgctactgttagcccaaatccaattagggttcccccacgagggagaggaatggtgtgatgctcggcgcgagtggaacgaccgaaagatccggtgagatctatctcccttatattggccacctcagcgaccatatcgtccttcttgaagacggatcgatcatgaccattgcgagaattgatggcgttgcattcgagcttgaggaaactgaaatgcgcaatgcgcgttgtcgtgcgttcaacacgctgttgcgcaatatcgctgatgatcatgtgtcaatatatgctcacctcgtacgtcatgccgacgtgccatcatcggcgccgcgacacttccgtagtgttttcgccgctagcctgaacgaagcttttgaacagcgcgtgctctccggccaactcctccgcaatgaacacttccttacgttgattgtctacccacaggcggctttagggaaggtaaagaggaggttcaccaagctaagcggaaaaagggaaaacgatctcacgggccagatcaggaacatggaagatctttggcatgttgtcgctggctctcttaaagcgtatggcctgcatcgtcttggcatccgcgagaagcagggtgtgctcttcaccgaaattggcgaagcgctacggttgatcatgactggtcggttcacaccggttccggtcgtcagcggctcactcggcgcttcgatttataccgacagagtcatttgcggcaagcgaggactcgagatcagaacgccaaaagacagttacgttggatccatctattcgtttcgcgaataccctgcaaaaacacggccgggcatgctcaacgcgctgctatccctcgattttccacttgttctcacgcagagtttttcgttcctgactcgcccgcaagcgcacgcgaaacttagcctcaaatcgagccagatgctgagttccggcgataaagccgtgactcaaatcggcaaattatccgaggctgaggacgcacttgcgagcaacgaattcgttatgggctcacatcatttgagcctttgcgtctatgcagacgatctcaatagtcttggggacaggggcgcgcgggctcggacacgaatggcggatgcaggtgccgtggttgtccaagaaggtattggtatggaagcggcctattggtcccaattgccggggaattttaagtggcgcacacgccctggcgcaatcacttcacgcaatttcgcagggtttgtctctttcgaaaactttccagagggcgccagctcaggccactggggcaacgcgattgcccgatttcgtaccaatggcggaacgcctttcgactatatcccgcatgagcacgatgttggcatgacggcaatattcgggcctatcgggaggggtaagacgacgctcatgatgtttgttctagccatgctcgaacagagcatggtcgaccgtgcaggtacggtcgtgttctttgacaaggaccggggtggcgaattgctggttcgcgccacaggaggaacatatttggcacttcacagaggcacacccagcgggttggcgccgttgcgtggcctagaaaacacagcagcctcacacgattttctgcgcgaatggatcgtggctctcatcgagagtgatggtcggggtgggatttctccggaagagaaccgccgtctggtccgtggtatccatcgtcagctctcgtttgatccacaaatgcgttcaatcgcggggttacgtgaatttttgttgcatgggcccgccgaaggcgcaggagcgcggctccaacgctggtgccggggccatgcgcttggctgggcatttgacggcgaagttgacgaagtaaagttagatccgtcgattaccggcttcgacatgacgcatcttctcgaatacgaggaagtatgcgctcccgctgcagcatatctcctgcatcggattggagccatgatcgacggccgccgttttgtgatgagctgcgatgagtttcgcgcctatttgttaaaccctaaattttcgactgtcgtcgacaaattcctcctgaccgttcgaaaaaacaacgggatgctaatactggcaacgcagcaaccagagcatgttctggaatcgccgctaggagccagcttggttgcgcaatgtatgacgaagattttctatccatcaccaaccgcagatcgatcggcttatgtcgatggactgaaatgtaccgaaaaggaatttcaggcgatccgtgaagacatgacggtcggcagccgtaagtttcttcttaaacgagaaagtggaagcgtcatctgcgaatttgatctgcgggatatgcgtgaatatgtcgccgtgctttcggggcgtgccaacacggtgcgctttgcaactcgactacgcgaggcacaagaaggcaactcatctggctggctcagcgaattcatggcccgtcaccacgaggcagaagattgataaggtaggaaacgatgaagacgacgcaacttattgcaacagttttgacctgcagctttctatatattcagcccgcgcgggcgcagtttgttgttagcgacccggcaacggaggctgagacgctcgcgactgcgctcgcgactgcggagaatctcactcagactatagcgatggttacgatgttgacgtcggcctacggcgttactggactactgacttcgctcaaccagaaaaatcagtatccttcgacgaaggacctagacaatgaaatgttttcgccgcgaatgccaatgtcgaccacggcacgtgcgatcaccagcgatacagatcgtgcagtcgtgggtagtgatgctgaagcggacctgttgcgatcgcagatcaccggttccgcaaacagcgctggcattgcggctgacaatctggaaacgatggacaaacgcttgacggcgaatgctgatacgtctgctcagctttcccgatctcgcaatatcatgcaggcaaccgtgaccaatggtttgcttctcaagcagatccatgacgcaatgattcaaaatgtacaggcgacaagcctattaacgatgactaccgcgcaggccggccttcacgaggcggaagaggcggccgctcaacgcaaggagcatcaaaagaccgctgtcatctttggtgccctcccctaaggctgggcgatttgttcatccgcccgcatcctcgccgaatgcgagctcattttatccaacattatgcgacaaaccagtcaagttcaggtccaatcgatgaatttcacgattccggcgccgtttacggccattcatacgatcttcgatgtagccttcacgacaggcttggactcgatgcttgagactatccaggaggcggtgagtgcgccattgatcgcctgtgtcactctttggattattgttcagggtattttagtcatacgcggcgaagtcgatacccgtagcggtatcactcgggtgatcacggtcaccatcgttgttgctctaattgttgggcaggctaactaccaagactatgtggtttccatcttcgaaaagacggtcccaaactttgttcagcagtttagtgtaaccggcttgcctctgcagactgttccggcacagttggatacaatgttcgccgtgacccaggccgtttttcagaaaatcgcatccgaaatcggtccgatgaacgaccaggacatccttgctttccaaggggcacagtgggtcctttacggcacgctctggtctgccttcggagtttacgacgccgttggaattctcacgaaagtgcttctcgcgatcgggcctctgatcctcgtcggatatatttttgatcgcacgcgggacatcgcagctaagtggatcgggcaacttatcacctacggtctcttgcttctcctcttaaacctcgtggcaacgatcgtcatcctaaccgaagcgactgcgctcacccttatgcttggtgtaatcaccttcgccggtacgaccgcggccaagatcattggtctttacgaactcgatatgttttttctgacaggggatgcgctcattgtcgctttgccggcgatcgccggcaacattggaggcagttactggagcggcgcaacccaatctgccagcagcttgtaccgtcgcttcgctcaggttgagcgaggctaggtcgcgcaaaaattcgcctcaatggagaattctatgaagtattgcctgctgtgcctagttgtcgctttgagcggctgccagacaaacgacacattagcgagctgcaaaggcccgatcttcccgctgaatgtggggcgatggcagcctactccgtcagatcttcagctcggcaattcgggtggacgctatgacggggcctgaatatgccatgctagtggcgcgcgaaagccttgccgagcactataaggaagtagaagcctttcaaaccgcgcgagcgaaatcggcgcgacgtctctccaaactcattgcagctgtcgcagctatcgcgattttgggaaatgttgctcaagcgttcgctatagccacaatggtgccgttgagcaggcttgtgcccgtatatctatggatacggccggacggcaccgttgacagcgaggtgtctgtctcgcgattgcctgcaactcaagaggaggccgtcgttaacgcctcattgtgggagtacgttcgcctgcgcgagagttatgatgccgacaccgctcagtacgcctacgacctggtatcgaacttcagtgccccaacagtgcgccaggattaccagcaattcttcaactatcccaatcccagttcgcctcaagtcattcttggcaaacgcggcagggtggaggtcgagcacatcgcttcaaatgatgtaactccaagcacgcagcaaattcgctataaaaggaccctcgtcgttgacggcaaaatgcctgtggtgagtacgtggaccgcgacagttcgctacgaaaaggtgaccagcttgcccggcagattgagactaaccaacccggcaggtctggttgtcacctcctatcagacatcggaagataccgtttcaaacgtaggccacagcgaaccatgatcagaaaagcacttttcattttagcatgtttatttgccgctgcgactggtgcggaggctgaagacactccaatggcgggcaagctagatccgcgcatgcgttatttggcttacaatcccgatcaagtggtgcgcctctcgacggcggttggagctactttggtcgtaacattcgccacgaacgaaacggtgacagcggttgccgtttcaaatagcaaagatctagcagccctaccgcggggaaattatctatttttcaaggcaagccaggtcctcacgcctcagccagtaatcgtgctaaccgcaagcgactccgggatgcgccgttatgttttcagtataagttccaagactctgtcccacctcgataaagagcagcccgatctctattacagcgtccaattcgcctaccccgccgacgatgcggcggctcggcgaagggaggcacaacagaaggctgttgtggacagactacacgcggaagcacaatatcaacggaaagctgagaatttattggatcagcctgtcacagcccttggtgcggcggacagtaattggcactacgtcgcccaaggcgatcgttcgctgttgccactcgaagtcttcgacaatggatttacgacggtattccactttccgggcaatgtacgcataccctccatctacaccatcaatcctgatggcaaggaagctgttgccaactattcagttaaagggagcgatgtcgagatttcttcggtttcccgaggttggcgtctgagggatggccacacagtactatgtatctggaacaccgcttacgatcccgttggccaaaggccgcaaacgggcacggtgaggcccgatgtgaaacgcgtcctgaagggggcgaagggatgaataacgatagtcagcaagcggcacatgaggttgatgcatctggatccctggtctccgacaaacatcgccggcgtctttcggggtctcagaaattgatcgtcggaggtgtcgttctcgcgttatcattaagcctcatttggctaggtgggcgccaaaagaaggtgaatgagaacgcatcgccgtcaactttgatcgcaacaaacaccaagccatttcatccagctccgattgaggtgccgccggatcctccagcggttcaagaggctgttcagcctgctgctcctctaccgccgaggggcgaaccggagcggcatgagccacggccggaagaaacaccgatttttgcatatagcagcggcgatcaaggggtcagcaaacgcgccattcagggcgacacgggccgaagacaagaaggcaagcgtgacgacaactccttgccgaatggcgaagtgtccggcgagaacgatttgtcgatacgtatgaaacccaccgagctgcagcccagcagcgccacgctcttgccgcaccccgattttatggtaacgcaagggacaataattccgtgcatcttgcaaaccgcaatcgacacaaatttggcaggctatgtaaagtgtgtcttgcctcaggatattcgtggaacaacgaacaatatcgtgcttcttgatcgtggcaccaccgttgttggcgaaatacagcgtggcttgcaacagggagatgggcgcgtttttgtgttgtgggatcgcgccgagacacctgaccatgcgatgatctcgttaacatcgccaagcgcggacgaactcggtcgctcaggattgccgggctcggtcgacagccacttctggcagcgttttagcggagctatgctcttgagtgttgttcaaggcgccttccaggcagctagcacctacgccggcagctcgggtggcgggatgagcttcaacagctttcaaaataacggtgagcagacaactgagacagcccttaaggcaaccatcaacataccgccaaccctgaagaagaatcagggtgacaccgtttccattttcgtagcacgggacctcgatttctttggtgtttaccagctccgcctgactggcggcgccacgcgggggaggaaccgccgctcttaatgaattcaaatttccgcttagagataggatacattgtaaatggaagtggatccgcaactacgctttcttctgaagccgattttggaatggctcgatgacccgaagactgaagaaattgcgatcaatcgacctggagaggcatttgtgcgccaagccggcatttttaccaagatgcctttgcccgtctcttatgatgatcttgaagatatcgctattttagcgggcgcgctgagaaagcaggatgtcggaccacgtaaccccctctgcgccactgaacttcctggtggtgaacgactacaaatctgtctgccgccgaccgttccctcgggcaccgtcagcttgaccattcgacggccaagctcgcgtgtttctggtcttaaagaagtctcctcccgttatgatgcttcgaggtggaaccagtggcagacacgaaggaaacgccaaaatcaggatgatgaagctatccttcagcattttgacaacggggatttggaagcgtttctgcacgcatgcgtcgtcagccgactgacgatgttgctatgtggccctaccggaagcggcaagacaacaatgagcaagaccttgatcagcgccatccccccccaggaaaggctaatcaccatagaagatacgctcgaactcgtcattccacacgataatcatgttagactactctactccaagaacggtgctgggctgggtgctgtgagcgccgagcacttgctccaagcaagtctgcgtatgcggccggaccggatattgcttggcgagatgcgcgacgatgcagcatgggcttatctgagtgaagtcgtctcgggacatccgggatcgatttcaacaatacacggcgcgaatccaatccaaggattcaagaaactgttttcccttgtcaaaagtagcgcccaaggtgctagcttggaagatcgcacactgattgacatgctctctacggcgatcgatgtcatcattccattccgtgcctatgaggacgtttatgaagtaggcgagatctggctcgcggcggacgcacgacgccggggcgagaccataggcgatctccttaatcaatagtagctgtaacctcgaagcgtttcacttgtaacaacgattgagaacttttgtcataaaattgaaatacttggttcgcattttcgtcatccgcggtcagccgcaattctgacgaactgcccatttagctggagatgattgtacatccttcacgtgaaaatttctcaagcgctgtgaacaagggttcagattttagattgagaggtgagccgttgaaacacgttcttcttatcgatgacgatgtcgctatgcggcatcttattatcgaataccttacgatccacgccttcaaagtgaccgcggtagccgacagcacccagttcactagagtactctcttccgcgacggtcgatgtcgtggttgttgatctaaatttaggtcgtgaagatgggcttgagatcgttcgaaatctggcggcaaagtctgatattccaatcataattatcagtggcgaccgccttgaggagacggataaagttgttgcactcgagctaggagcaagtgattttatcgctaagccgtttagtacgagagagtttcttgcacgcattcgggttgccttgcgcgtgcgccccaacgttgtccgctccaaagaccgacggtctttttgttttactgactggacacttaatctcaggcaacgtcgcttgatgtccgaagctggcggtgaggtgaaacttacggcaggtgagttcaatcttctcctcgcgtttttagagaaaccccgcgacgttctatcgcgcgagcaacttctcattgccagtcgagtacgcgacgaggaggtttacgacaggagtatagatgttctcattttgcggctgcgccgcaaacttgaggcggatccgtcaagccctcaactgataaaaacagcaagaggtgccggttatttctttgacgcggacgtgcaggtttcgcacggggggacgatggcagcctgagccaattgcatttgattaatttaggtgactgaggacgcggccagcggcctcaaacctacactcaatatttggtgaggggttccgataggtccctcttcaccaattgctcgatggcttctctccagcaaagaatgacgcgagcgcggcggtagccagcttgtggccgaaagctcgagcggtctccaaccccaacggatcaaaatgacttcgagcgacctcgagcaacgcaaccgggaacatgcgtgaggtctgaacgagaacggatttttctgtagttgaagggatcggataacttttcggggccacgcgaaatgatccatctgccagcatgctttcgaaatcgtccaacgcgcgccttaaaatcatttgtagcgacttcgagggactgtattgccgaacgaggttgtcatatgttttcgacacttgaggcgcgggcggtcgcgctgaaagaaaaacctggagctttttcggggacggaggtggactaagggcatccacagttagcttaagttgtcgatcgggactgtaaatgtgatcggcgacgagaggctcacgttgctggtctttctcgtcggctttttcaggcaagtgctggaggtccagcttctggggaacaagtgtcgggttgggatggtggatctcgggtcgagcaccagcaagccgccgtgcttcgccgaccgacaatgcgggcttgcgaattgccatcttcaagcctccaagattttgctgatcagtttcgaaatgaccacgacttcctccatcgcaatccgaagattcctctctatgaggcgcatcgtcggatcagttcccgtgtttagtaatgtaagatgcaacatgccgcgttctttcatcgcggcaaatgcatctctttcatgcatgggagacggtacaactggaaggctctctagcgtctctgacatcctgcgttgcgatgttgtcaatcggccgaccgggacgcgttggcgcaaaacagctgtaggaattgccaaattttcactcaacagcagctcgatgacgtagcggtaggtagatagtgcctcatcgatgtcgagcggcgttagcatggtggggatcagaagcaggtttgagctagcgatgattgtgttgttgagctcgctcgagccgccacgcgtatcggccaacgcataatcaaatccttcgagctcggcattttcataggctgcttcaagaaggggcatttcgtcggcggaatagacttcacagcgaggatcccaggtactgctttgtaaggcgttttctctccatcgcgtcagaggccggttttcgtcggcatcaaagagggccactcgtttaccgtcatttgccaaagcagcgcaaaggcccatgagtgcggtggttttgccagcaccccctttgaaagaacaaaacgtcaaaagttgcatattctgatcccgcctatcctgtgaaaccggagtgcatttgtatttttgttcgtataaatgtttttgtgattatcgatgagtaaaagcgttgttacactatttttatttcacattcgttataagacaattgcaaatgtagcaagtatattcagtattgactgtaaatgtactgttgatttcatattgagcagggctagacttccatccgtctacccgggcacatttcgtgctggagtatccagaccttccgctttctttggaggaagctatgtcaaaacacaccagagccacgtcgagtgagactaccatcaaccagcatcgatccctgaaagttgaagggttcaaggtcgtgagtgcccgtctgcgatcggccgagtatgaaaccttttcctatcaagcgcgcctgctgggactttcggatagtatggcaattcgcgttgcggtgcgccgcatcgggggctttctcgaaatagatgcagacacacgagaaaagatggaagccatacttcagtccatcggaatactctcaagcaatgtatccatgcttctatctgcctacgccgaagaccctcgatcggatctggaggctgtgcgagatgaacgtattgcttttggcgaggctttcgccgccctcgatggactactgcgctccattttgtccgtatcccggcgacggatcgacggtcgctcgttactgaaaggtgccttgtagcacttgaccacgcacctgacgggagaaaattggatgcccgatcgcgctcaagtaatcattcgcattgtgccaggaggtggaaccaagacccttcagcagataatcaatcagctggagtacctgtcccgaaagggaaagctggaactgcagcgttcagcccggcatctcgatattcccgttccgccggatcaaatccgtgagcttgcccaaagctgggttacggaggccgggatttatgacgaaagtcagtcagacgatgacaggcaacaagacttaacaacacacattattgtaagcttccccgcaggtaccgaccaaaccgcagcttatgaagcaagccgggaatgggcagccgagatgtttgggtcaggatacgggggtggccgctataactatctgacagcctaccacgtcgaccgcgatcatccacatttacatgtcgtggtcaatcgtcgggaacttctggggcaggggtggctgaaaatatccaggcgccatccccagctgaattatgacggcttacggaaaaagatggcagagatttcacttcgtcacggcatagtcctggatgcgacttcgcgagcagaaaggggaatagcagagcgaccaatcacatatgctgaatatcgacgccttgagcggatgcaggctcaaaagattcaattcgaagatacagattttgatgagacctcgcctgaggaagatcgtcgggacctcagtcaatcgttcgatccatttcgatcggacgcatctgccggcgaaccggaccgtgcaacccgacatgacaaacaaccgcttgaaccgcacgcccgtttccaggagcccgccggctccagcatcaaagccgacgcacggatccgcgtaccattggagagcgagcggggtgcccaaccatccgcgtccaaaatccctgtaactgggcatttcgggattgagacttcgtatgtcgctgaagccagcgtgcccaaacaaagcggcaattccgatacttctcgcccggtgactgacgttgccatgcacacagtcgagcgccagcagcgatcaaaacgacgtcatgacgaggaggcaggtccgagcggagcaaaccgtaaaagattgaaggccgcgcaagttgattccgaggcaaatgtcggtgagcccgacggtcgcgatgacagcaacaaggcggctgatccggtgtctgcttccatccgtaccgagcaaccggaagcttctccaacgtgtccgcgtgaccgtcacgatggagaattgggagaacgcaaacgtgcaagaggtaatcgtcgcgacgatgggcgcggggggacctagactagtagacaggaaggaccgaataatggcaaatggtcagttcacgatacgctctgctcgcccggcctccgtcggactgacaggcgaacggcgtggagccgcatccgcctctagctctgcactgtccaatgttcaaagagatgttagggataggctgattccaactagctcaccaagattaccaaatgcagccatattgcgtgattcctcgggaagagcgtcgactggtctgcggtacatggcggctactcttcattggtctgcgatcgcgccattatcgctaataaacagcaacgacctggctccggccgcttatgactttgagacgcgaaataacgcaagaaatgtgactgccaaagtcggcagggcagtccctgttcccaagcaaggcgggctcggcaaaacgctcgcacccgtaccccttagtacacgtatatcaagggtcaattccgaccgaagactgcccgctgacgcagaagaccgccctgaaacgcgcgacccccagaaaggacgtggcagtcatggtgcgacgccaaccttacatgaaaagattggaaccgcgtttgctcgaagattgcgaaagcatacgtactatattgtttgcagttgctgccagacccggagcgcgttgacgatgggtgcaaagatttcggtgaagtcatgaactccagcaagacttcgccccagcgtatgaccctgagcatcgtatgttcgctggcagccggtttttgtgcggccagctgctatgtaacgttccgccggggcttcaacggcgaagcgatgatgacgttcgacgttttcgctttttggtatgagaccccgctttacttgggttatgccagcaccgtcttctggcgtggtttatctgttgtcatctttacctcgctgatcgttctttcaagtcagctcatcatatcgctgcgcaatcagaagcatcatgggacagctcgttgggcagaaattggcgaaatgcggcatgctggttatctgcagcgttacagtcgcatcaaggggccgatctttggaaagacatgtggtcccctttggttcggcagttatttgaccaatggcgaacagccacacagtcttgtcgtcgcgccaacgcgtgctggcaaaggcgtcggcatcgtcattccaacgctgttgaccttcaagggctcggtaatcgcccttgacgtcaagggagaattgtttgaactgacgtccagagcacgcaaagcgagcggcgacgcagttttcaagttctcccccctagatcctgagcggaagactcattgttacaatccggtcctggatattgccgcacttccgcccgaacgccagttcactgaaacacgccgtctagctgcgaaccttattacggctaagggaaagggagcagaaggctttattgacggcgcacgtgacctgttcgtcgcgggaatccttacctgcattgagcgtggcacaccaacgattggcgcggtatatgacctatttgcgcagcctggcgaaaagtataagctttttgcgcaactcgcggaggaaagcctaaacaaagaggctcagcgtatcttcgataatatggcgggcaacgacacgaaaattctgacatcgtacacctctgtgctgggcgacggtggactgaacctgtgggctgatccgcttatcaaagcagcgacaagccggtcagacttttccgtttacgatctccggaggaagaagacctgcatttatctttgtgtcagtcccaacgatctggaggtcttggcaccacttatgcgcctgatgtttcagcagctcgtgtcaatcttgcagagatcgctgccaggtgaagacgagtgccatgaagttttatttctcctcgacgaattcaaacacctgggcaagcttgaggccatagagaccgcgatcacaaccatcgccggttacagaggccgctttatgtttattattcaaagtctttcggccttgtcgggcacatacgatgacgcaggaaaacaaaactttctgagcaatactggcgtacaagtatttatggccacggctgatgacgaaactccaacctacatctcaaaagctatcggcgaatatacgtttaaagcgcgttcgacctcttacagtcaagccagaatgttcgaccacaacatccagatttctgatcaaggtgcagcccttttgcgccccgaacaagtgcgcctgctagacgatcagagtgaaatcgttctcatcaaagggcgacctccactcaaattacgaaaggtgcagtattattccgatcgtacgctgaaaggccttttcgaacgccagatgggctctctgcctgagcccgcacccttgatgctttccgactatagcaacgatcaagttcaataccacttggctccgatagcaaattttaatgaggatgctgcaccgcaaaacagaactgtggccgaggaccatggaagtgttaaagtcggtgctgatatccctgaacgcgtgatgggaataaatggtgacgaggaacaagccgatgcgggcgagataccgccggaatcggttgtgcctccagaattgacgctcgctctgaccgctcaacagcaattgttggaccagattattgcacttcagcaaagatcgaggtccgcaccggcatagcctgcgaaatgatcttaatggtgcaattcgtttcaggcggcatgttgcggttcaacaaagtgtacgccagatcccaattggccctttacgaggtgtcggtatgacaggaaagtcgaaagttcacataagaggttcggctgacgcgcttcctgacgttcctggcggaagtactaccgccccttttttaaccgaaccttctcgggatcaggttgatgcctcgtttgaggtccaaaccgactacagccagtctacttccgtgtcgtttacctatgatggtgttggacttggtcctgccgagcgtgcggcttacgagaactggtgcgaaccgggccggcccacttggaaagatcttataatcaaggcacgtgtcgatccgattgacgatgtgacctggctccgagatttagaagaggacaccccctcaaccttcagatacgaagggatgcctctgggcatcggggaacgacaggcctacgaaaattggcaagaggacgctcagccgacatgggaagaccttgttgtcagcgcacgcttgacggaacttggccgtccacacgggattaccggcgagtatacatccctcgcaggatcgaagaatacaagttcaatttcattgaagcgaaagcggagcaacttaattgatgatgagaattcatccggatcgttttcatatgacgggatgaagctcggggaagccgagcgttctgcatatggtgactgggccgaggcggagccacccacgtggaaagatttggtattgagggcacgcgtttcctcgatcaatgactctgcttggctttttgattcacaaacatcttcatcatcatttgaatacaacggtgttcccttgggcgagccggaacggcaggctctcagacaatggcaaggagacgctcagcctacctgggaagatctcgttgttaacgcgcgtatggcagaactttgccatgctggttggattgaaggtcaaaaaggttgctttgaagagcgcggggaggctctgcccgcgtcggaacgcggttcgcaacgccccattggtcaacggacagattcctccgattcttttgtgtatgatggcacaaggctcggagcacctgagcgaactgcttatgaacgctggagtaagagggaacgcccgacttgggaagatctcatcttagatgcacaccaggccaggactgaaagtgacgctgttacgacccaagcgattggtcagtcgtcctcaccggttttcttatatgaaggaaagtcgctcggagacagggaacgaaaggcttacgaaaaatggcggcagccagcccaaccgcgatggcaaaatcttgtagtgaacgctcgtctggcagaaatcgatccctcagcctggattgccgatgagcgcgatccgcttgatgatagcgacgcgcttggtcgcccgtcgtacacaagcttgacggatagatcagacgtccctttagacgatcaatcaatctatcgtcgttccgacctagtaagggagcaggtgccagaatcgtctcaaaggcaattcgcagcatgttcagaatctgaaacgaggcctgtgcaatggtttactgcttctgggtcagatgcaaacaatacggaaaatatcaccgccagcgatcccgtcgatcgcacgggtggagttaagcggctaggctccaaaagcgacagaaccgttacagcttctatccatgacgtgaattccagcacaaggcgactgttgcttaacgaatttggatcggaggctccgcgcccttcgccagaaaagactgttcgcttaagaagcgacaatattggcacctatgggagccggaaaaatgaacgagcgcggctcgcgaccgaaaccggtgcgtatgagtcggagcatattttcgggttcaaggctgtccacgatactgcgagagcgacgaaagagggccggcgtctcgaaaggcccatgcccgcctaccttgaggataaggggcttcatcgccaacatattggcaccgggagaggacggaccaaacttgtcgggcgcggatggccggatgacacaagctatcgctcggatcaaagggcaactctgtcggaccccgttgcgcgctcggaaggcgcgacggcctcaaatgggtatcaattgaaccaattgggttacgcgcaccaactcgctagcgatggcctgcaaagtgaatcgcccgatggtgttgccttgccaattcaagtggcaacaacgagctacaactatacagtgagccgcgatcctgtccttgttccgccggataaaaacgaagcccctcaattgctgcatcttggtccccgtggtcaaaccgaagctgttcttgcccgcgaaacagcattgactggaaaatggccgactctcgagcgtgagcagcaagtgtatcgcgagtttttggccttatatgacgtaaaaaaagatcttgaggccaaatcagtcggcgtaagacggaaaaaaaaagaagttatttctgcgttagaccgaactgcgcgcttgataagcacgtcgccttcgaaagctcgatccaaagcagagactgaaaaagccattgatgagctcgatgatcgacgagtttatgatccgcgtgatcgagctcaagacaaagcgtttaaacgctgataagtcgccaatatagtgatcatttgcagtattcgcatcgatcgctggttgatattctgccgctggtcgaccggctgctcgtcgccaaaaatgctcacagggatacgatggcctcggtcaggccgcgtgcgtcctgtctttccagttcctccctttcagctcgattgtggcatcatttattgcctgctcattgcagttgaaacgcgatatccgtttcaagacccgggtatggatggtactttggagatatgagcacttgccagacttcccggtcggagacttaaaaattccgataagaggttacggacgacggaccttataagtggatcgtctagtggtggcgccgatcaaaacagttccgcccccggctttgctcaaagtagcaaagcagctttatctcgggttgcggaggattttctagaaaaccgcaattttgcaggagagaacatatggccatcatcaagccgcatgtgaacaaaaataggacaacctcgccgatagagagaccggagtctctcatagaggaaatgagcggcagtcatccgccgagtggttttaccaacctggatctcgctatgatcgagctggaggactttgtccatcggtgcccgctcccagaagacaatcttgctggtcagaaggagtgagacgatggatccgtctagcaatgagaatgtctatgtgggtcgcggtcacaacatcgaaaatgatgatgacactgaccccaggcgttggaagaaggcgaatatcagttccaacaccatctccgatattcagatgacgaatggcgaagacgtacaatcagggagccctacccgaacggaagttgtaagcccacgtctggattatggatcggtcgactcctcctccagcctttattctggcagcgagcacggaaatcaagctgagattcaaaaagagctgtccgtcttgttctcgaacatgtctttgccaggcaacgatcggcgcccggacgaatacattctcgtgcatcaaacgggacaagatgcttttactggtattgccaaaggcaacctcgaccaaatgcccaccaaggcggaatttaacgcgtgctgccgtctctacagggacggagccggtaattactacccgccacctctcgcattcgacaagattagcgttccagagcaactggaggaaaaatgggggatgatggaggcgaaggaacgtaacaaactgcggtttcagtacaagttggacgtatggaatcatgcgcacgctgatatggggatcacgggcacagagatcttttatcaaacagataagaacataaagctcgaccggaattataaactaagacctgaagaccgatacgtacaaacagaaaaatacgggcgccgggaaattcaaaagcgatatcaacacgaactccaggctggttcgctgctgcccgatattatgatcaaaactccccaaaatgacatccacttcgtgtacaggtttgccggcgacaattacgccaacaaacagttcagcgagtttgaacacaccgtcaagcgcaggtatggcgacgagactgagatcaaattgaagtcaaagtcaggcattatgcatgactcgaaatatctggaatcctgggaacggggcagtgcggatattcgcttcgcggaattcgttggggaaaatagagctcacaatcggcagtttccaactgcgacagtaaatatgggacagcagccagacgggcagggcggtttgacccgcgaccgtcatgtgagcgttgacttcctaatgcaaagcgcacccaattcgccttgggcgcaagctttgaaaaagggagaactgtgggatcgcgttcagttgcttgctcgcgacggcaaccgctatctgtcgccgcccagattggaatattctgaccctgcacatttcaccgagttgatgaaccgggttggtttacccgcatcgatgggtcggcaaagccatgcggctagtatcaaattcgaaaagtttgacgcgcaggcagcggttattgtcttaaatggcccagagttacgtgacattcatgacttgtctcctgaaaaactgcaaaatttgtccaccaaagatgtcatcgtcgccgatcgcaatgagaatggtcagagaactggcacgtacaccagcgtcgcggaatatgagcgcttgcagttaaggctgccacccgatgcagcgggggtgcttggtgaagcaactgacaaatattcacgtgatttcgttcggccagagccggcgtcgcgtccaatcagtgacagccgcaggatatacgaaagtcgaccgcgtagccaaagcgtcaacagcttttgacgttcctgctgccgcgtcaacgaggaagctcgtttgacccgggtttgccaatgaaagggctcaatcatggtgaacactacaaagaaaagttttgcgaagtcgcttacggcagatatgcgccgttctgctcagcgcgttgtcgagcaaatgcgaaaagcattgattaccgaagaagaggcgctcaagcggcaagccagactggagagtcccgataggaagcgaaagtatgctgctgatatggcgatagtcgacaaactcgacgtagggtttcgaggcgaaataggctataaaattcttggaaataaccggcttcgagtagacaaccataaagaattaacgcgtgagcacggtagacttcgcaaaaccaaaacggttctgaagcgtaacccggtgacgcaggaagtctatttgggtttatatgaaaggaagtcctggttaagtgtcagcagccatttgtatgctgcggacggcacactccgcatgaagcacgtgaaatacaaagacggacgttttgaggaaaaatgggagcgcgacgaaaatggcgacctgatccgcacaaggtacgccaaccgtggcaggctctttcaacctgtatccgagaaaatgggcgcgccgtatcggagcggccctgacgaccggctctatcgcgatctaacccgtcgaaacggtttcagacgggagacattcgaacgggacgatcacggaaacctcgagcgtatcggcagcaaccatgtcggcttttccaagatttcagtgaaggcacccaatcgtcaaacctcccagacgaagattcaaaaacttggtggcgctttcaacaaatcttttaggtcccttctggacaaggagggcaatgaaatgggccgcgatattttgagccatcgacggctctataacaagcggtctgctgtctacgatgaagctaccggacaattgaagagtgccaagcataccttcggcaagatctacaggagcgaaaccgaatatctcagcgcgggcctcaagaaggtttcaaaaaagatactcggggtgacggtctaccggaaatttgcggcgctcagcgagcgagaatccgaggctgagagactgcgtagttttgaatccggtgcgcatcgccagatctggcaggagcgggcagcgattcccggttcgcccctcccggagactgatgacattcatttcgcacagcagtcgcacctagccaaagccaaccctgatcacgtcgaagctgacgtcacgcgtgtgacagatcaacatgttgatgttgctggacaaacatcatcgtctccccaacggaacttggaaggatggttagattctcaatcacgatacaagccagcaaacatgctgttgtcaaatccagaccttcaagcgaacggacctcgcccatacgaagggttagctcatctcaccctccggcgcgataatgaatctgacgggcacaaggagaatgatcagcggctgcgacatttctcccagccagagccgttggtgttaccgcatcccgggtcgccggaaataactaaggtgtttggctcgcggggagagccggcacacccgagtggaaatctgcacacggcggttggagaaacggcttgcgaaggaccggtgatgtcttcatcctcggacaatcatcagccagctccaggacagcaagaacttttaagtttccttcataatgcgccagccccagtttctgtggcaatacatgatgatcaagagcgacttgcgggggaggcgcccggcggctctttcagaggtagctcagggcgaacgagttcaatgtcggagagtatcttcgacgaagatgtacaagggcatttggtacgggattattcgatcaatactactaacgggtttattgacccgcaatcgttgttcggtgaaccggacttatcgagaggtccaaaatcggggccagaaattccatcggaagattaccatttgtcagcttcggaacaggaaaatttgctgaatcaattgcttagtgtgccactgccggttccttcaccgaagcccgaatgcgcgaggtctatgattttcgaaggttcacgttcaagagagcgttccacctccagagggttctaaggtggaacgcgtctaggcttgcctatcatcaccacctcatgatggtcgcggagaccttcgaagagatatccgacatcattggagaagctgggccggaaactagtgtacctcgcgaatgcatctagatccaatccaatatgcatggcatgccgaatccatgtgggagtttattcttgacacagatatttatgatataataactgagtaagcttaacataaggaggaaaaacatatgttacgcagcagcaacgatgttacgcagcagggcagtcgccctaaaacaaagttaggtggctcaagtatgggcatcattcgcacatgtaggctcggccctgaccaagtcaaatccatgcgggctgctcttgatcttttcggtcgtgagttcggagacgtagccacctactcccaacatcagccggactccgattacctcgggaacttgctccgtagtaagacattcatcgcgcttgctgccttcgaccaagaagcggttgttggcgctctcgcggcttacgttctgcccaagtttgagcagccgcgtagtgagatctatatctatgatctcgcagtctccggcgagcaccggaggcagggcattgccaccgcgctcatcaatctcctcaagcatgaggccaacgcgcttggtgcttatgtgatctacgtgcaagcagattacggtgacgatcccgcagtggctctctatacaaagttgggcatacgggaagaagtgatgcactttgatatcgacccaagtaccgccacctaataatgtctaacaattcgttcaagccgacgccgcttcgcggcgcggcttaactcaagcgttagatgcactatacgtaccaatccaaatcggatccccctgcagggctgagataggtgcctcactgattaagcattggtaactgtcagaccaagtttactcatatatactttagattgatttaaaacttcatttttaatttaaaaggatctaggtgaagatcctttttgataatctcatgaccaaaatcccttaacgtgagttttcgttccactgagcgtcagaccccgtagaaaagatcaaaggatcttcttgagatcctttttttctgcgcgtaatctgctgcttgcaaacaaaaaaaccaccgctaccagcggtggtttgtttgccggatcaagagctaccaactctttttccgaaggtaactggcttcagcagagcgcagataccaaatactgtccttctagtgtagccgtagttaggccaccacttcaagaactctgtagcaccgcctacatacctcgctctgctaatcctgttaccagtggctgctgccagtggcgataagtcgtgtcttaccgggttggactcaagacgatagttaccggataaggcgcagcggtcgggctgaacggggggttcgtgcacacagcccagcttggagcgaacgacctacaccgaactgagatacctacagcgtgagctatgagaaagcgccacgcttcccgaagggagaaaggcggacaggtatccggtaagcggcagggtcggaacaggagagcgcacgagggagcttccagggggaaacgcctggtatctttatagtcctgtcgggtttcgccacctctgacttgagcgtcgatttttgtgatgctcgtcaggggggcggagcctatggaaaaacgccagcaacgcggcctttttacggttcctggccttttgctggccttttgctcacatgttctttcctgcgttatcccctgattctgtggataaccgtattaccgcctttgagtgagctgataccgctcgccgcagccgaacgaccgagcgcagcgagtcagtgagcgaggaagcggaagagcgcctgatgcggtattttctccttacgcatctgtgcggtatttcacaccgcatatggtgcactctcagtacaatctgctctgatgccgcatagttaagccagtatacactccgctatcgctacgtgactgggtcatggctgcgccccgacacccgccaacacccgctgacgcgccctgacgggcttgtctgctcccggcatccgcttacagacaagctgtgaccgtctccgggagctgcatgtgtcagaggttttcaccgtcatcaccgaaacgcgcgaggcagcagatctatcgatggtacctatctgcagacggaagggattcctgttaattaaaacagcttgcgtcatgcggtcgctgcgtatatgatgcgatgagtaaataaacaaatacgcaaggggaacgcatgaaggttatcgctgtacttaaccagaaaggcgggtcaggcaagacgaccatcgcaacccatctagcccgcgccctgcaactcgccggggccgatgttctgttagtcgattccgatccccagggcagtgcccgcgattgggcggccgtgcgggaagatcaaccgctaaccgttgtcggcatcgaccgcccgacgattgaccgcgacgtgaaggccatcggccggcgcgacttcgtagtgatcgacggagcgccccaggcggcggacttggctgtgtccgcgatcaaggcagccgacttcgtgctgattccggtgcagccaagcccttacgacatatgggccaccgccgacctggtggagctggttaagcagcgcattgaggtcacggatggaaggctacaagcggcctttgtcgtgtcgcgggcgatcaaaggcacgcgcatcggcggtgaggttgccgaggcgctggccgggtacgagctgcccattcttgagtcccgtatcacgcagcgcgtgagctacccaggcactgccgccgccggcacaaccgttcttgaatcagaacccgagggcgacgctgcccgcgaggtccaggcgctggccgctgaaattaaatcaaaactcatttgagttaatgaggtaaagagaaaatgagcaaaagcacaaacacgctaagtgccggccgtccgagcgcacgcagcagcaaggctgcaacgttggccagcctcgcagacacgccagccatgaagcgggtcaactttcagttgccggcggaggatcacaccaagctgaagatgtacgcggtacgccaaggcaagaccattaccgagctgctatctgaatacatcgcgcagctaccagagtaaatgagcaaatgaataaatgagtagatgaattttagcggctaaaggaggcggcatggaaaatcaagaacaaccaggcaccgacgccgtggaatgccccatgtgtggaggaacgggcggttggccaggcgtaagcggctgggttgcctgccggccctgcaatggcactggaacccccaagcccgaggaatcggcgtgagcggtcgcaaaccatccggcccggtacaaatcggcgcggcgctgggtgatgacctggtggagaagttgaaggcagcgcaggccgcccagcggcaacgcatcgaggcagaagcacgccccggtgaatcgtggcaagcagccgctgatcgaatccgcaaagaatcccggcaaccgccggcagccggtgcgccgtcgattaggaagccgcccaagggcgacgagcaaccagattttttcgttccgatgctctatgacgtgggcacccgcgatagtcgcagcatcatggacgtggccgttttccgtctgtcgaagcgtgaccgacgagctggcgaggtgatccgctacgagcttccagacgggcacgtagaggtttccgcagggccggcaggcatggccagtgtgtgggattacgacctggtactgatggcggtttcccatctaaccgaatccatgaaccgataccgggaagggaagggagacaagcccggccgcgtgttccgtccacacgttgcggacgtactcaagttctgccggcgagccgatggcggaaagcagaaagacgacctggtagaaacctgcattcggttaaacaccacgcacgttgccatgcagcgtacgaagaaggccaagaacggccgcctggtgacggtatccgagggtgaagccttgattagccgctacaagatcgtaaagagcgaaaccgggcggccggagtacatcgagatcgagctagctgattggatgtaccgcgagatcacagaaggcaagaacccggacgtgctgacggttcaccccgattactttttgatcgatcccggcatcggccgttttctctaccgcctggcacgccgcgccgcaggcaaggcagaagccagatggttgttcaagacgatctacgaacgcagtggcagcgccggagagttcaagaagttctgtttcaccgtgcgcaagctgatcgggtcaaatgacctgccggagtacgatttgaaggaggaggcggggcaggctggcccgatcctagtcatgcgctaccgcaacctgatcgagggcgaagcatccgccggttcctaatgtacggagcagatgctagggcaaattgccctagcaggggaaaaaggtcgaaaaggtctctttcctgtggatagcacgtacattgggaacccaaagccgtacattgggaaccggaacccgtacattgggaacccaaagccgtacattgggaaccggtcacacatgtaagtgactgatataaaagagaaaaaaggcgatttttccgcctaaaactctttaaaacttattaaaactcttaaaacccgcctggcctgtgcataactgtctggccagcgcacagccgaagagctgcaaaaagcgcctacccttcggtcgctgcgctccctacgccccgccgcttcgcgtcggcctatgcatataattgtggtttcaaaatcggctccgtcgatactatgttatacgccaactctgaaaacaactttgaaaaagctgttttctggtattt

SEQ ID NO: 2 - DNA, 30298 bp, synthetic construct
  source 1..30298: mol_type = other DNA
ccttttcacgcccttttaaatatccgattattctaataaacgctcttttctcttaggtttacccgccaatatatcctgtcaaacactgcggccgcacttgaccgcggatggagccggagctgtggtgaggccatcgacgggaggtgggggagaacacagtctcagtgttctttgtgagtccgcaaggtttttagcttttctgtattaattaaggttgctgttggctgtagaatacggtcgtggaagagctgtatcggtagctactacgtaagctattatatactggaagtctggagctcgtcgatctccggtcgtcttcctccatttctcctcgtcttgctttgactgctgctaccatttgcttctgttttctgatgaagcatgccatgtcggccaccagtgtttgtgtggtttttgcagggaatggctttcaagtgctgtgattgaatggccctcgtcgtcctcggctgagctcacatggacgcgtcatgtgagtgagatatatgatcatatgatgagtggggttcgggtgagtgcgtacttgaagtaggatcccgctttcactcattcattcattggcctttaaaccgggaaattttcgcgaggagatggagggaagcaagcagggtgacgagtgcagagtgccgcgagcgctttgtcaaaaggcaccgccgtaggcaaaaaaatcaatggccctgactgactcgatggtagtactactgtagagactagagagggttgctccccatatcttcgtgtgacttttactccagcattgcatttccgtcattgagacgttaattaatagcagctttcgggacagatgactgtggccatgtttcgtcacggccgcttcgtgccagctgggggtactatagtactgtgattttgttagtaaaaactttcattaggccaccattgacgaccgggccttcgcttttgctgcgctaattaaccatttcccggcgaccgaagggaacatgaacatgccccgacacatgagggcatgaggactagtgttctccctgtcgttcgttgacttgactagtgatagtttaaacgctcttcaactggaagagcggttactaccggttcactagctagctgctaatcgagctagttaccctatgaggtgacatgaagcgctcacggttactatgacggttagcttcacgactgttggtggcagtagcgtacgacttagctatagttccggacttacctagctaataacttcgtatagcatacattatacgaagttatggttaccgagctcccctggccgaagcttacactgatagtttaaactgaaggcgggaaacgacaatctgatcatgagcggagaattaagggagtcacgttatgacccccgccgatgacgcgggacaagccgttttacgtttggaactgacagaaccgcaacgattgaaggagccactcagccgcgggtttctggagtttaatgagctaagcacatacgtcagaaaccattattgcgcgttcaaaagtcgcctaaggtcactatcagctagcaaatatttcttgtcaaaaatgctccactgacgttccataaattcccctcggtatccaattagagtctcatattcactcccatggcggccaatgcgggcggcggtggagcgggaggaggcagcggcagcggcagcgtggctgcgccggcggtgtgccgccccagcggctcgcggtggacgccgacgccggagcagatcaggatgctgaaggagctctactacggctgcggcatccggtcgcccagctcggagcagatccagcgcatcaccgccatgctgcggcagcacggcaagatcgagggcaagaacgtcttctactggttccagaaccacaaggcccgcgagcgccagaagcgccgcctcaccagcctcgacgtcaacgtgcccgccgccggcgcggccgacgccaccaccagccaactcggcgtcctctcgctgtcgtcgccgccgccttcaggcgcggcgcctccctcgcccaccctcggcttctacgccgccggcaatggcggcggatcggctgtgctgctggacacgagttccgactggggcagcagcggcgctgctatggccaccgagacatgcttcctgcaggactacatgggcgtgacggacacgggcagctcgtcgcagtggccacgcttctcgtcgtcggacacgataatggcggcggccgcggcgcgggcggcgacgacgcgggcgcccgagacgctccctctcttcccgacctgcggcgacgacggcggcagcggtagcagcagctacttgccgttctggggtgccgcgtccacaactgccggcgccacttcttccgttgcgatccaacagcaacaccagctgcaggagcagtacagcttttacagcaacagcaacagcacccagctggccggcaccggcaaccaagacgtatcggcaacagcagcagcagccgccgccctggagctgagcctcagctcatggtgctccccttaccctgctgcagggagtatgtgagagcaacgcgagctgccactgctcttcactgatgtctctggaatggaaggaggaggaagtgagaacagatcattcgacaaagcagcattagtccgttgatcggtggaagaccactcgtcagtgttgagttgaatgtttgatcaataaaatacggcaatgctgtaagggttgttttttatgccattgataatacactgtactgttcagttgttgaactctatttcttagccatgccaagtgcttttcttattttgaataacattacagcaaaaagttgaaagacaaaaaaaaaacccccgaacagagtgctttgggtcccaagcttctttagactgtgttcggcgttccccctaaatttctccccctatatctcactcacttgtcacatcagcgttctctttccccctatatctccacgctctacagcagttccacctatatcaaacctctataccccaccacaacaatattatatactttcatcttcaactaactcatgtaccttccaatttttttctactaataattatttacgtgcacagaaacttagcaaggagagagagagcgggaatttaaatgctcggcgttaggcttttagtccgctaggtggctagaccgaggttaggacgctagttcactaggggcctagtggtgttttaagacgtcacggtcaccgcggccgcatcgagcagctggcttgtggggaccagacaaaaaaggaatggtgcagaattgttaggcgcacctaccaaaagcatctttgcctttattgcaaagataaagcagattcctctagtacaagtggggaacaaaataacgtggaaaagagctgtcctgacagcccactcactaatgcgtatgacgaacgcagtgacgaccacaaaactcgagcaacgagatcatgagccaatcaaagaggagtgatgtagacctaaagcaataatggagccatgacgtaagggcttacgcccatacgaaataattaaaggctgatgtgacctgtcggtctctcagaacctttactttttatgtttggcgtgtatttttaaatttccacggcaatgacgatgtgaccgtcgacccactaaaacattgctttgtcaaaagctaaaaaagatgatgcccgacagccacttgtgtgaagcatgagaagccggtccctccactaagaaaattagtgaagcatcttccagtggtccctccactcacagctcaatcagtgagcaacaggacgaaggaaatgacgtaagccatgacgtctaatcccattcgaaacgcgtggaccgaagcttgcatgcctgcagtgcagcgtgacccggtcgtgcccctctctagagataatgagcattgcatgtctaagttataaaaaattaccacatattttttttgtcacacttgtttgaagtgcagtttatctatctttatacatatatttaaactttactctacgaataatataatctatagtactacaataatatcagtgttttagagaatcatataaatgaacagttagacatggtctaaaggacaattgagtattttgacaacaggactctacagttttatctttttagtgtgcatgtgttctcctttttttttgcaaatagcttcacctatataatacttcatccattttattagtacatccatttagggtttagggttaatggtttttatagactaatttttttagtacatctattttattctattttagcctctaaattaagaaaactaaaactctattttagtttttttatttaataatttagatataaaatagaataaaataaagtgactaaaaattaaacaaataccctttaagaaattaaaaaaactaaggaaacatttttcttgtttcgagtagataatgccagcctgttaaacgccgtcgacgagtctaacggacaccaaccagcgaaccagcagcgtcgcgtcgggccaagcgaagcagacggcacggcatctctgtcgctgcctctggacccctctcgagagttccgctccaccgttggacttgctccgctgtcggcatccagaaattgcgtggcggagcggcagacgtgagccggcacggcaggcggcctcctcctcctctcacggcaccggcagctacgggggattcctttcccaccgctccttcgctttcccttcctcgcccgccgtaataaatagacaccccctccacaccctctttccccaacctcgtgttgttcggagcgcacacacacacaaccagatctcccccaaatccacccgtcggcacctccgcttcaaggtacgccgctcgtcctcccccccccccctctctaccttctctagatcggcgttccggtccatgcatggttagggcccggtagttctacttctgttcatgtttgtgttagatccgtgtttgtgttagatccgtgctgctagcgttcgtacacggatgcgacctgtacgtcagacacgttctgattgctaacttgccagtgtttctctttggggaatcctgggatggctctagccgttccgcagacgggatcgatttcatgattttttttgtttcgttgcatagggtttggtttgcccttttcctttatttcaatatatgccgtgcacttgtttgtcgggtcatcttttcatgcttttttttgtcttggttgtgatgatgtggtctggttgggcggtcgttctagatcggagtagaattctgtttcaaactacctggtggatttattaattttggatctgtatgtgtgtgccatacatattcatagttacgaattgaagatgatggatggaaatatcgatctaggataggtatacatgttgatgcgggttttactgatgcatatacagagatgctttttgttcgcttggttgtgatgatgtggtgtggttgggcggtcgttcattcgttctagatcggagtagaatactgtttcaaactacctggtgtatttattaattttggaactgtatgtgtgtgtcatacatcttcatagttacgagtttaagatggatggaaatatcgatctaggataggtatacatgttgatgtgggttttactgatgcatatacatgatggcatatgcagcatctattcatatgctctaaccttgagtacctatctattataataaacaagtatgttttataattattttgatcttgatatacttggatgatggcatatgcagcagctatatgtggatttttttagccctgccttcatacgctatttatttgcttggtactgtttcttttgtcgatgctcaccctgttgtttggtgttacttctgcaggtcgactttaacttagcctaggatccatggccactgtgaacaactggctcgctttctccctctccccgcaggagctgccgccctcccagacgacggactccacactcatctcggccgccaccgccgaccatgtctccggcgatgtctgcttcaacatcccccaagattggagcatgaggggatcagagctttcggcgctcgtcgcggagccgaagctggaggacttcctcggcggcatctccttctccgagcagcatcacaaggccaactgcaacatgatacccagcactagcagcacagtttgctacgcgagctcaggtgctagcaccggctaccatcaccagctgtaccaccagcccaccagctcagcgctccacttcgcggactccgtaatggtggcttcctcggccggtgtccacgacggcggtgccatgctcagcgcggccgccgctaacggtgtcgctggcgctgccagtgccaacggcggcggcatcgggctgtccatgattaagaactggctgcggagccaaccggcgcccatgcagccgagggtggcggcggctgagggcgcgcaggggctctctttgtccatgaacatggcggggacgacccaaggcgctgctggcatgccacttctcgctggagagcgcgcacgggcgcccgagagtgtatcgacgtcagcacagggtggagccgtcgtcgtcacggcgccgaaggaggatagcggtggcagcggtgttgccggcgctctagtagccgtgagcacggacacgggtggcagcggcggcgcgtcggctgacaacacggcaaggaagacggtggacacgttcgggcagcgcacgtcgatttaccgtggcgtgacaaggcatagatggactgggagatatgaggcacatctttgggataacagttgcagaagggaagggcaaactcgtaagggtcgtcaagtctatttaggtggctatgataaagaggagaaagctgctagggcttatgatcttgctgctctgaagtactggggtgccacaacaacaacaaattttccagtgagtaactacgaaaaggagctcgaggacatgaagcacatgacaaggcaggagtttgtagcgtctctgagaaggaagagcagtggtttctccagaggtgcatccatttacaggggagtgactaggcatcaccaacatggaagatggcaagcacggattggacgagttgcagggaacaaggatctttacttgggcaccttcagcacccaggaggaggcagcggaggcgtacgacatcgcggcgatcaagttccgcggcctcaacgccgtcaccaacttcgacatgagccgctacgacgtgaagagcatcctggacagcagcgccctccccatcggcagcgccgccaagcgcctcaaggaggccgaggccgcagcgtccgcgcagcaccaccacgccggcgtggtgagctacgacgtcggccgcatcgcctcgcagctcggcgacggcggagccctggcggcggcgtacggcgcgcactaccacggcgccgcctggccgaccatcgcgttccagccgggcgccgccagcacaggcctgtaccacccgtacgcgcagcagccaatgcgcggcggcgggtggtgcaagcaggagcaggaccacgcggtgatcgcggccgcgcacagcctgcaggacctccaccacctgaacctgggcgcggccggcgcgcacgactttttctcggcagggcagcaggccgccgccgctgcgatgcacggcctgggtagcatcgacagtgcgtcgctcgagcacagcaccggctccaactccgtcgtctacaacggcggggtcggcgacagcaacggcgccagcgccgtcggcggcagtggcggtggctacatgatgccgatgagcgctgccggagcaaccactacatcggcaatggtgagccacgagcaggtgcatgcacgggcctacgacgaagccaagcaggctgctcagatggggtacgagagctacctggtgaacgcggagaacaatggtggcggaaggatgtctgcatgggggactgtcgtgtctgcagccgcggcggcagcagcaagcagcaacgacaacatggccgccgacgtcgggcatggcggcgcgcagctcttcagtgtctggaacgacacttaagcgtacctagtggtacctgacatcttatagtctgcaacctctcgtgtctgaattcctatctttatcaagtgttattgcttccacgactataggacagctttcgtcgaaagcttttgctcatgtgatctcgaaggattcatctagtctgatttttcgtgacttgtatcggttttattggattcatccaacatatatcaataaaaaatgagttgtgtttcctttcttcctagttcagttaaaattatttccctcctgcgcttgtgctgtaattgtctgtgtacctgttgtttgtgactgtgttagttcccttggatatgatttcgtatttgatatgtacatggagatagcttagcttcattattggagtatgaagttagtatgacatagtcactctcctggaaaattgacactgcaaaccatatttttattctgaaccacaaatcctagtcagtccgctggcatatgccgtccgtttgctgaatccagaacgtgggtttggagatgtacggctgagatgcctctatgcgaaggggatttcgtggtgaaacgagatgggagtagagcaacgcccgtggaagatgcttcaaacttccacacttttgagcaacgatcggcagtagtaaggtagacgatttcaagatcaaagcatatgaagataaacaacatcaacaacaaaatttgttggggttctatagagagaaacagagctacatacatacactgttttgtatctaccatctgagatgatgaaaagatgaaaaactaaagaatgccccggcgccaacgccaggacacgccgcgcgcgcgtcacccgagccatctcttgacccagccggcgctgtatatttacacacgttgcagcatcgatcaccacctgttcgatcgcgtcgccgtcaccggcgcgccgcgacttattgaactagtctagggcgcggctaacaacctagcttagattgccttgtctaaacccttaggctaacgcgccactctagaaggccgatctccccgggttaccgagctccaccttgctagttggatattacctcttctcttcaaagtatccttgaacgctcaccggttatcaaatctctacactatagctctgtagtcttgctagatagttagttctttagctctctctagaggttcacaaactcaatacaacacacagtggagtagggtattacgctccggcggcccgaaccactctaaatccttgtgtcctcgtgtgctcttccaccattaatgactgtaattgcagggacacgaagagttgtagcgcttttgccaacaagatccgctatatgctagtagagtggaacctgcacagcaacaagcatccaataatctgagaataagaattatgtgtggtgatggttctcatctctgcaactcgccattttcgcgagagaaccaaatccaagttggtgaagatcatgatttgggctcatgggctggcatagtagctattacctttgcaattgtggttcgaatctatccgatattctccttttcagggagagctaatgcttatgcttattgggtattttggtttgacactgcttcacgcccaaaaaaaggcaactatgtctgagttggatatggcccaaaaaaaggcagctatgtctgagttggatatggaagtcttctttcgtttagggtgaagtaagaccaagctcatgagcttattatcttaggtcggaacaaattagttgataggcatggcacatttatcaaattataatgattttaacagaaaagcaacacctctttttcagcagcaccagctttgcaagctgcaattgacactccaagcatagtatttgctccaaactcagcctgcatttcgcacaatatcatatctatttccatttggataaaatatattttccagaaatatgggaacagaatcaagatacagaaaaaagttgtggtagtagtggtaagtggaaacacaagtacagtgaaaagatagcattatttctgaacagtcaaattaaccgaaataagtagtatcacatactgcccctaaattgactacacccaatgtaaagaattgcttgagcatattgagccatcagttgtttgtttgtgtaacggatttgacaatgcagagttcaggagcaaaaaaccgcaaaggagagaaagagggaaaggatctcctagtatcccaccttgtggcgcgccctgtcaagtgcatgatggcctggtcgatctgcgtctgctgctgcggttccatcccaacgagtgcctccgacaccttgtcgttgatcacccgcaccgcgtaggcgacccccctggcgaggaacttccgcctctcggaggccccggccgcgtcggcggcggcgccctcgagcgcgcccacgctagccgtagatgctcggtgcacggccttgttggtgtgcaactcgacctcaacggccggtgcgctacgcccgtcaaggatctggcgcgcccgcaccctcgtgatcacggtgggcgcctcccgcctcatgtggccgacgatgaaaagcgccgggttaggggccttggcgcgcaccgccgtattcagggcctcctcgctcttgcgcgagagcaggtgcttccccaggtactcctgcactgacaaggctgccacagcggtggaatttgtcctcacgacttcgccacgtcgtcctcacctccctggcttcccacgactccgccgtatcgaggtgctcggtgggtcgtcttaatccgaagtccgaactaggaagacgagacagagaggtctgaggaatgggcctcgtttgatgttgagctgaattatttttccagcataagcccaggtcttggtccatgaacaaaattactagaaacccagcccagtactacgatctaaaagagggactgccactggatagctctctctagcattctccacgctccaatacagcggcgtcgtgtctatccgggtctatccgcgaacacgtgagaactctccagaaactgctttctcctccacttcatctctctcgctttccctctataaaaagaccccttctaggaattgagggagacagcaagcaccaagcagcgatccgaagctcaatcaattcactcaaacctcttccccaaatcttcgattagatcttcgttgacaagaagactagaaccgaacctgacatgtccaacctgctcacggttcaccagaaccttccggctcttccagtggacgcgacgtccgatgaagtcaggaagaacctcatggacatgttccgcgacaggcaagcgttcagcgagcacacctggaagatgctgctctccgtctgccgctcctgggctgcatggtgcaagctgaacaacaggaagtggttccccgctgagcccgaggacgtgagggattaccttctgtacctgcaagcgcgaggtttgtttctgcttctacctttgatatatatataataattatcattaattagtagtaatataatatttcaaatatttttttcaaaataaaagaatgtagtatatagcaattgcttttctgtagtttataagtgtgtatattttaatttataacttttctaatatatgaccaaaacatggtgatgcctaggtctggcagtgaagaccatccagcaacaccttggacaactgaacatgcttcacaggcgctccggcctcccgcgccccagcgactcgaacgccgtgagcctcgtcatgcgccgcatcaggaaggaaaacgtcgatgccggcgaaagggcaaagcaggccctcgcgttcgagaggaccgatttcgaccaggtccgcagcctgatggagaacagcgacaggtgccaggacattaggaacctggcgttcctcggaattgcatacaacacgctcctcaggatcgcggaaattgcccgcattcgcgtgaaggacattagccgcaccgacggcggcaggatgcttatccacattggcaggaccaagacgctcgtttccaccgcaggcgtcgaaaaggccctcagcctcggagtgaccaagctcgtcgaacgctggatctccgtgtccggcgtcgcggacgacccaaacaactacctcttctgccgcgtccgcaagaacggggtggctgcccctagcgccaccagccaactcagcacgagggccttggaaggtattttcgaggccacccaccgcctgatctacggcgcgaaggatgacagcggtcaacgctacctcgcatggtccgggcactccgcccgcgttggagctgctagggacatggcccgcgccggtgtttccatccccgaaatcatgcaggcgggtggatggacgaacgtgaacattgtcatgaactacattcgcaaccttgacagcgagacgggcgcaatggttcgcctcctggaagatggtgactgaggtacccaacctagacttgtccatcttctggattggccaacttaattaatgtatgaaataaaaggatgcacacatagtgacatgctaatcactataatgtgggcatcaaagttgtgtgttatgtgtaattactagttatctgaataaaagagaaagagatcatccatatttcttatcctaaatgaatgtcacgtgtctttataattctttgatgaaccagatgcatttcattaaccaaatccatatacatataaatattaatcatatataattaatatcaattgggttagcaaaacaaatctagtctaggtgtgttttgcgatccgatatcgatcaccttgctagttggatattacctcttctcttcaaagtatccttgaacgctcaccggttatcaaatctctacactatagctctgtagtcttgctagatagttagttctttagctctcgggccctggccgaagcttcgtgcgcacgataacttcgtatagcatacattatacgaagttataacagcggaccgggttaccgaattcctgcccttaaggccaattgttcaagattcattcaacaattgaaacatctcccatgattaaatcagtataaggttgctatggtcttgcttgacaaagtttttttttgagggaatttcaactaaatttttgagtgaaactatcaaatactgattttaaaaaatttttataaaaggaagcgcagagataaaaggccatctatgctacaaaagtacccaaaaatgtaatcctaaagtatgaattgcattttttttttgtttggacgaaaggaaaggagtattaccacaagaatgatatcatcttcatatttagatcttttttgggtaaagcttgagattctctaaatatagagaaatcagaagaaaaaaaaaccgtgttttggtggttttgatttctagcctccacaataactttgacggcgtcgacaagtctaacggacaccaagcagcgaaccaccagcgccgagccaagcgaagcagacggccgagacgttgacaccttcggcgcggcatctctcgagagttccgctccggcgctccacctccaccgctggcggtttcttattccgttccgttccgcctcctgctctgctcctctccacaccacacggcacgaaaccgttacggcaccggcagcacccagcacgggagaggggattcctttcccaccgttccttccctttccgccccgccgctataaatagccagccccatccccagcttttttccccaatctcatctcctctctcctgttgttcggagcacacgcacaatccgatcgatccccaaatccccttcgtctctcctcgcgagcctcgtggatcccagcttcaaggtacggcgatcgatcatcccccctccttctctctaccttcttttctctagactacatcggatggcgatccatggttagggcctgctagtttcccttcctgttttgtcgatggctgcgaggcacaatagatctgatggcgttatgacggctaacttgtcatgttgttgcgatttatagtccctttaggagatcagtttaatttctcggatggttcgagatcggtggtccatggttagtaccctaagatccgcgctgttagggttcgtagatggaggcgacctgttctgattgttaacttgtcagtacctgggaaatcctgggatggttctagctcgtccgcagatgagatcgatttcatgatcctctgtatcttgtttcgttgcctaggttccgtctaatctatccgtggtatgatgtagatgttttgatcgtgctaactacgtcttgtaaagttaattgtcaggtcataatttttagcatgcctttttttttgtttggttttgtctaattgggctgtcgttctagatcagagtagaagactgttccaaactacctgctggatttattgaacttggatctgtatgtgtgtcacatatcttcataaattcatgattaagatggattgaaatatcttttatctttttggtatggatagttctatatgttggtgtggctttgttagatgtatacatgcttagatacatgaagcaacgtgctgctactgtttagtaattgctgttcatttgtctaataaacagataaggatatgtatttatgttgctgttggttttgctggtactttgttggatacaaatgcttcaatacagaaaacagcatgctgctacgatttaccatttatctaatcttatcatatgtctaatctaataaacaaacatgcttttaaattatcttcatatgcttggatgatggcatacacagcggctatgtgtggttttttaaatacccagcatcatgggcatgcatgacactgctttaatatgctttttatttgcttgagactgtttcttttgtttatactgaccctttagttcggtgactcttctgcaggtcgactttaacttagcctaggatccatggcccagtccaagcacggcctgaccaaggagatgaccatgaagtaccgcatggagggctgcgtggacggccacaagttcgtgatcaccggcgagggcatcggctaccccttcaagggcaagcaggccatcaacctgtgcgtggtggagggcggccccttgcccttcgccgaggacatcttgtccgccgccttcatgtacggcaaccgcgtgttcaccgagtacccccaggacatcgtcgactacttcaagaactcctgccccgccggctacacctgggaccgctccttcctgttcgaggacggcgccgtgtgcatctgcaacgccgacatcaccgtgagcgtggaggagaactgcatgtaccacgagtccaagttctacggcgtgaacttccccgccgacggccccgtgatgaagaagatgaccgacaactgggagccctcctgcgagaagatcatccccgtgcccaagcagggcatcttgaagggcgacgtgagcatgtacctgctgctgaaggacggtggccgcttgcgctgccagttcgacaccgtgtacaaggccaagtccgtgccccgcaagatgcccgactggcacttcatccagcacaagctgacccgcgaggaccgcagcgacgccaagaaccagaagtggcacctgaccgagcacgccatcgcctccggctccgccttgccctccggactcagatctcgatagggtaccaatggccagttaacagatccagctgctgctgttctagggttcacaagtctgcctatttgtcttccccaatggagctatggttgtctggtctggtccttggtcgtgtcccgtttcattgtgtactatttacctgtaatgtgtatccttaagtctggtttgatggtgtctgaaacgttttgctgtggtagagcagcatggaagaactataatgaataagtgatccctaatcattgtgtccaaattttgcttctgctatacccttttgtgctgtttcttatgttttgcttaaaaatttgatctgacaaacaaatttgtctaaattatgctcttgttctgactgtgtactgtacacatttgtattgctaccggtttggcacatagttttctctttgattgcagatcaaacccttctgattgcagattgcttggctatggctgatgtgctcactgttcttctttagcttgtatattgctgatggtggcttggctacggctgaaaaagttgctgctgcgccgacttggcaactgttgctccagtaatgctttgtcctctcttcctagccgccgacttggcacttggcagctgttgctcctgtaatgcgttgttatctcttatctcttgagatgtactatgattttgaggctgtttgacttgtgccagattgccagtgctgatgctatattatctcaggtttttatgctagtatatgttttactgtgtgctgcctgtgtcgagttacgtaatctattgaaccgctatgcgtgttgatgccctgttgttgcttgccagattgatgcccctgttgcttgcagcttgcaagctgtagtgaaatcctaaaattcgaaaccaaatctattctgaacttttgaagatctgtgatgtccggaagaaaagattcaaacagataaacgggactctccagaatctataaaataaatgatcgacaaacgctttgctttggtaggcttcctagttagttagcggaccgaagcttcggtccgggcctagaaggccagcttcggccgcccctcggtaccctgggatctgcccttactttaacgcctctaaccaacacccctttatctttataaggaacaataaacagaatttgccccactgttctaaatcacctaataatatccccagctaaaaacaataaaggtttcctagaattaagacaagcatgactgttcctccaggagggtttggaacattgttgcagtcttgcagatacgggcgaagggtgagaaacagagcggagggctggaggtgacctcggtagtcgacgccggagttgagcttgacaacgacggggcggcccctgatggacttgaggaagtccgatggcgtcttcaccgtcccgccggcgcccgaggcgggcctgtcgctgccgccgccgccgctgctcatcttgcgcgctgtgcccccggcggtgtccctgtgttgcggatcgcgggtgggccaggtggatgcgagggcgacccgtttggactccggccggagccgccggatccctggtcggtgtcagtgccgtttactctgggccccacgtgtcagtaccgtctgtagatgacaacaacccgtcgtccacagtcatgtccaaaatatcctttcttcttttttttcgattcggatatctatcttccttttttttttccaaaaatcttcttgacgcaccagcgcgcacgtttgtggtaaacgccgacacgtcggtcccacgtcgatagaccccacccaccagtgagtagcgtgtacgtattcgggggtgacggacgtgtcgccgtcgtcttgctagtcccattcccatctgagccacacatctctgaacaaaaaaaaggagggaggcctccacgcacatccccctccgtgccacccgccccaaaccctcgcgccgcctccgagacagccgccgcaaccatggccaccgccgccgccgcgtctaccgcgctcactggcgccactaccgctgcgcccaaggcgaggcgccgggcgcacctcctggccacccgccgcgccctcgccgcgcccatcaggtgctcagcggcgtcacccgccatgccgatggctcccccggccaccccgctccggccgtggggccccaccgagccccgcaagggtgctgacatcctcgtcgagtccctcgagcgctgcggcgtccgcgacgtcttcgcctaccccggcggcgcgtccatggagatccaccaggcactcacccgctcccccgtcatcgccaaccacctcttccgccacgagcaaggggaggcctttgccgcctccggctacgcgcgctcctcgggccgcgtcggcgtctgcatcgccacctccggccccggcgccaccaacctagtctccgcgctcgccgacgcgctgctcgattccgtccccatggtcgccatcacgggacaggtggcgcgacgcatgattggcaccgacgccttccaggagacgcccatcgtcgaggtcacccgctccatcaccaagcacaactacctggtcctcgacgtcgacgacatcccccgcgtcgtgcaggaggctttcttcctcgcctcctctggtcgaccagggccggtgcttgtcgacatccccaaggacatccagcagcagatggcggtgcctgtctgggacaagcccatgagtctgcctgggtacattgcgcgccttcccaagccccctgcgactgagttgcttgagcaggtgctgcgtcttgttggtgaatcgcggcgccctgttctttatgtgggcggtggctgcgcagcatctggtgaggagttgcgacgctttgtggagctgactggaatcccggtcacaactactcttatgggcctcggcaacttccccagcgacgacccactgtctctgcgcatgctaggtatgcatgggacggtgtatgcaaattatgcagtggataaggccgatctgttgcttgcacttggtgtgcggtttgatgatcgcgtgacagggaagattgaggcttttgcaagcagggctaagattgtgcacgttgatattgatccggctgagattggcaagaacaagcagccacatgtgtccatctgtgcagatgttaagcttgctttgcagggcatgaatgctcttcttgaaggaagcacatcaaagaagagctttgactttggctcatggaacgatgagttggatcagcagaagagggaattcccccttgggtataaaacatctaatgaggagatccagccacaatatgctattcaggttcttgatgagctgacgaaaggcgaggccatcatcggcacaggtgttgggcagcaccagatgtgggcggcacagtactacacttacaagcggccaaggcagtggttgtcttcagctggtcttggggctatgggatttggtttgccggctgctgctggtgcttctgtggcaaacccaggtgtcactgttgttgacatcgatggagatggtagctttctcatgaacgttcaggagctagctatgatccgaattgagaacctcccagtgaaggtctttgtgctaaacaaccagcacctggggatggtggtgcagttggaggacaggttctataaggccaacagagcgcacacatacttgggaaacccagagaatgaaagtgagatatatccagatttcgtgacgatcgccaaagggttcaacattccagccgtccgtgtgacaaagaagaacgaagtccgcgcagcgataaagaagatgctcgagactccagggccgtacctcttggatataatcgtcccacaccaggagcatgtgttgcctatgatccctagtggtggggctttcaaggatatgatcctggatggtgatggcaggactgtgtactgacttcgaataggtacccggggatcctctagtgccgtgggtcgtttaagctgccgctgtacctgtgtcgtctggtgccttctggtgtacctgggaggttgtcgtctatcaagtatctgtggttggtgtcatgagtcagtgagtcccaatactgttcgtgtcctgtgtgcattatacccaaaactgttatgggcaaatcatgaataagcttgatgttcgaacttaaaagtctctgctcaatatggtattatggttgtttttgttcgtctcctaatatttgcctgggatcaaattttattggctggtgttcatttgacctccatgttcttgctaggctccattttttactctacagccataatatgtttgattgtttggtttgttctttgttgtacacctggttctgtcgagcttagttttcgacactggcttacagcttaacatgttgctattttattgggttctgattgctattttattgggttctgattgctagtttttgctgaatccaaaaaccatgttatttatttaagcgatccaggttattattatgatggtggctaagtttttttttttccaagggtaaattttctggattctccagtgtttctgtggccgaattcaatcactagagtcgacctgcaaagcttcggtccgggcctagaaggcccgcgccacttacgcttgattccgatgacttcgtaggttcctagctcaagccgctcgtgtccaagcgtcacttacgattagctaatgattacggcatctaggaccgactagttcttatgtgcttctagtctccaaatgtggttgatagttattttgctctaagatcaacagtaatgaagtataaatcatcgttgtggtgtgctactcggttaattgagcattaacacacacaaacatgacgaggatggtataatctccaaaaatgtgtactttgttaggtgggaccctatagccttgattaatgtgctatgttaggcatgcctggaaacgtgtgacgcatatgttttgtgaacctgttgatattatatgtgcttttatattaccatattttattaaaatactaatatttattactagtaagatataacattctatctagcttaaaaactaaccataaatattccataataactagatttaccaaactaatatactaaatatacataataaatacaaaattaacaagacaataatcaatatttatgagcttaatatatttagacattatggttggtcgacgataatcatgctaacttttcgtaattgcttgattgaaatatgcttagaataatgcctctttgttctacatggcaaatagggaccattatggtgtaacaccctgggaaccacaaacaccccgaaatgctactaaactacacaactaaccttcatatataaaatttcgacagcatctcctttgaaaatttgcatagacgtggaagcaacagagtataaacagatctgcgtttaaacgtgcaagcgctactagacaattcagtacattaaaaacgtccgcaatgtgttattaagttgtctaagcgtcaatttgtttacaccacaatatatcctgccaccagccagccaacagctccccgaccggcagctcggcacaaaatcaccactcgatacaggcagcccatcagtccgggacggcgtcagcgggagagccgttgtaaggcggcagactttgctcatgttaccgatgctattcggaagaacggcaactaagctgccgggtttgaaacacggatgatctcgcggagggtagcatgttgattgtaacgatgacagagcgttgctgcctgtgatcaaatatcatctccctcgcagagatccgaattatcagccttcttattcatttctcgcttaaccgtgacaggctgtcgatcttgagaactatgccgacataataggaaatcgctggataaagccgctgaggaagctgagtggcgctatttctttagaagtgaacgttgacgatcgtcgggcccaggtagaatccgcctgagtcgcaagggtgacttcgcctatattggacgacggcgcgcagagggcgacctctttttgggttacgattgtaggattatcactaaaacaatacatgaacatattcaaatggcaatctctctaaggcattggaaataaatacaaataacagttgggtggagtttttcgacctgtgggcgttaaccttctgttaacctaaaagctcttgcccaaacagcagaatcggcgctaattgccagcggcggaacttttccagtttcgcgaaaaatatcgccactggcaaggaatgggtttgagatggcgaagtctgtcctaaaagcagcgcctgtagttgtagggttgacggccttgatggagcgtcatgccgatgccctctcgagccaacttcaagcacatcatcttaaggttttcccgccgcattccgagaagggcattcgaacattcgggccatcggaggcgtccaagctgctcggcgttggcgagtcatatttacggcagaccgcgtctgagatgccagagttgaatgttagcatgagcccgggtggcaggcgaatgttctcaattgaagatatccatgcgattcggaagtatatggatcaggtcggccgcgggaaccggcgctacctgccacatcgtcgaggcggcgagcagcttcaggttatctctgtgatgaatttcaaaggtgggtcgggtaagaccaccaccgccgcgcatctggcgcagtacctcgctatgcgcggatatcgagtcttggccattgatctcgatcctcaagcgagcctttctgcactctttgggagccaaccggagacggacgttggcccgaacgaaacgctctacggcgctataaggtatgatgatgagcaggtggcaatcgaacgagtcgtccgagggacttacattcccgacctccacctgattcctggtaatcttgagctgatggagtttgaacacgatacgccacgcgcgctgatgaaccgcaaagagggcgacacgctcttttatggtcgcatcagccaagtaattgaagatatcgcggataactatgacgtcgtggtcatcgactgccctccccagcttgggtatctcacgctatccgcattgactgcggcgacgtccattcttgtcacggtccatccgcagatgctggatgtgatgtcgatgaaccagtttctggcaatgacatcgaaccttttgcgtgaaatcgagaatgctggcgccaagttcaagtttaattggatgcgctatctgataacccgtttcgaaccgagcgacggaccacagaaccaaatggtaggttatctgcggtcgatttttggcgaaaatgtcctcaattttccgatgcttaaaaccaccgcggtttcggacgctggcctgacaaaccagactctattcgaagtggagcgtggcctgttcacgcgctcgacctatgatcgagccttggaggcgatgaacgccgtcaacgacgagatcgaaacactgatcaaaaaagcatggggtaggcccacatgagccggaagcacatccttggcgtctcaactgacgcccctgagacgtcgcccgccgacaataggacggcaaagaaccgctccatgccgctcctcggcgtaacaaggaaggagcgcgatccggcaacgaagctcacagcgaacattggtaacgcactgcgagagcaaaacgatcgtcttagccgtgccgaagagatcgagcggcgtctcgctgaaggtcaggcagtgatagagttggatgcctcgtcaatagaaccgtctttcgtgcaggatcgtatgcgaggggacattgacgggctccttacttcgatccgggaacaaggacagcaagtcccaatccttgtgcgaccgcatccgagccagccgggccgatatcaggttgccttcggccaccgccggctacgcgccgtttcagaactcggacttccggtcagagcggtcgttcgcgaactgacggacgagcaagtggtcgtagcacagggtcaggaaaacaatgagcgcgaagatcttaccttcatcgaaaaggcgcgcttcgcacatcgcctgaacaggcagttttctcgagagattgtcatcgccgcgatgtcgatcgacaagagcaatttgtccaagatgcttctgctcgttgacgccctcccctctgaactgaccgatgctattggtgccgctcctggtgttggacggccgagttggcaacaacttgccgagctgattgagaaagtttcttcaccggccgacgtggctaaatatgctatgtcggaggaagttcaagcgctgccatcggcagaacgattcaaggcggtgatcgctagtctgaagcccagtcgggttgcgcgtggacttcccgaggtcatggccaccccagacggcaccagaattgcacaggtgacgcagagcaaggccaaactggaaatcacgattgacaggaaggcgacgcccgattttgcgaccttcgtgctcgatcatgtgccagcgctgtatcaagcgtaccacgctgagaaccaacggaaacggggagagtaaaccgcaaaagaaaagagccccctcaacgtcgccgtcgcggaagcccttctgtctctctagcgcgaacagaatcgcatttcctcgaatcctcgtcaagagtttttagcgccgttttggtgagctgatttcctttgcctgctgaaaggtgaaagatgatgcagacaggaagtgtaacgacgccattcgggcggcggccaatgacgcttgcgcttgtgcggcgccagacggcgctggccgatatcaaacaaggcaagacagcggacaagtggaaggtctttagagacgcgtccgcggctatggaactacttggaatccagtccaacagtcttgccgtccttgatgcgctattgagctttcacccggaaacggagttgcgtcaggaggcacagctgatcgtcttcccgtcgaatgctcagcttgcccttcgggcgcatgggatggctggcgcgactttgcgtaggcacatcgccatgctcgtggagtcaggcttgatcgtccggaaggatagcgccaacggaaagcgttacgctcgtaaggatggcgctggtcagatcgagcgcgcgtttggcttcgatttgtctccgcttctcgcgcggtcggaagagctagcgatgatggcacagcaggtgatggccgatcgagcagcattcaggatggccaaagaaagtctgacgatttgccgacgggacgttcggaagctaattacggcagctatggaagagggagcggagggcgactggcaagctgtcgaggaagtctatgtggaacttgtgggtagaattccacgcgccccgacgcttgctgatgtagagtcaattctcgaagagatgtggatgctccaggaagagataatcaaccggttggaaattagagacaattcagaaaataatagcaccaatgctgcccagagcgagcagcacatacagaattcaaaacccgaatccgttaatgaacttgaacctcgctctgaaaaggagcagggcgctaagccgagtgaaatagaccgggcaaggagcgagccgataaaagcgttccccctcgggatgatcctgaaagcatgcccgaccattggcaactatgggccgagcggtgcggttgctagctggcgtgacctcatgtcggctgcggtggtggttcggtctatgctgggggtcagcccgtcggcttaccaagacgcgtgtgaggcaatgggaccggagaatgcggcagcagcgatggcgtgcattttggagcgagcgaacttcatcaattcgcccgggggctatctccgagatctgacacggcggagcgagcttgggaagttttcacttggcccgatgataatggcgctcttgaaggctagcgggcaggggacgttgcggtttggctagaattagcgagtatggagcaggatggtctgtggtcagctgaccacagacctaataggttgaaaacatgagcgttttttggatgatcgacagaccatccgattcccggagtaccaagcgtgctctgatgggagcgataacattactcaacaagcacgaaggccccatgccgatcgttgatcgtgaaggagagcctgctctacatgcggcggtattttgccggccgaggcatgtagtcgcggagcactgcctatttactgccgtgccacctgggtccttttcatcacgtgctataaaaataattataatttaaattttttaatataaatatataaattaaaaatagaaagtaaaaaaagaaattaaagaaaaaatagtttttgttttccgaagatgtaaaagactctagggggatcgccaacaaatactaccttttatcttgctcttcctgctctcaggtattaatgccgaattgtttcatcttgtctgtgtagaagaccacacacgaaaatcctgtgattttacattttacttatcgttaatcgaatgtatatctatttaatctgcttttcttgtctaataaatatatatgtaaagtacgctttttgttgaaattttttaaacctttgtttatttttttttcttcattccgtaactcttctaccttctttatttactttctaaaatccaaatacaaaacataaaaataaataaacacagagtaaattcccaaattattccatcattaaaagatacgaggcgcgtgtaagttacaggcaagcgatccgtcctaagaaaccattattatcatgacattaacctataaaaataggcgtatcacgaggccctttcgtctcgcgcgtttcggtgatgacggtgaaaacctctgacacatgcagctcccggagacggtcacagcttgtctgtaagcggatgccgggagcagacaagcccgtcagggcgcgtcagcgggtgttggcgggtgtcggggctggcttaactatgcggcatcagagcagattgtactgagagtgcaccataccacagcttttcaattcaattcatcattttttttttattcttttttttgatttcggtttctttgaaatttttttgattcggtaatctccgaacagaaggaagaacgaaggaaggagcacagacttagattggtatatatacgcatatgtagtgttgaagaaacatgaaattgcccagtattcttaacccaactgcacagaacaaaaacctgcaggaaacgaagataaatcatgtcgaaagctacatataaggaacgtgctgctactcatcctagtcctgttgctgccaagctatttaatatcatgcacgaaaagcaaacaaacttgtgtgcttcattggatgttcgtaccaccaaggaattactggagttagttgaagcattaggtcccaaaatttgtttactaaaaacacatgtggatatcttgactgatttttccatggagggcacagttaagccgctaaaggcattatccgccaagtacaattttttactcttcgaagacagaaaatttgctgacattggtaatacagtcaaattgcagtactctgcgggtgtatacagaatagcagaatgggcagacattacgaatgcacacggtgtggtgggcccaggtattgttagcggtttgaagcaggcggcagaagaagtaacaaaggaacctagaggccttttgatgttagcagaattgtcatgcaagggctccctatctactggagaatatactaagggtactgttgacattgcgaagagcgacaaagattttgttatcggctttattgctcaaagagacatgggtggaagagatgaaggttacgattggttgattatgacacccggtgtgggtttagatgacaagggagacgcattgggtcaacagtatagaaccgtggatgatgtggtctctacaggatctgacattattattgttggaagaggactatttgcaaagggaagggatgctaaggtagagggtgaacgttacagaaaagcaggctgggaagcatatttgagaagatgcggccagcaaaactaaaaaactgtattataagtaaactaggcacaaacgttgactcttggatcgagctggcagacaaagcaataacccacacagaggacgattaatggctgacgaagagatccagaatccgccggacggtactgctgctgccgaagttgagccggctgctcctagaggtagaagagcaaagaaagcaccagccgaaacagcccgcacgggatcgttcaaatccgtgaagccgaaaacccgcggcctcagcaaccgagaaaaactggagaagatcggtcaaatcgaagctcaggtcgctggcggcgcaaccttgaaggacgccgttaagatcgtgggtatttccgttcagacctattatcaatggaagagagctgcggttcaacctgtctcacagaatccggccgtgtctgtttcagttgacgatgaactcggcgagttcatccaactcgaggaggaaaatatgcatggcatgcccgttccatacagaagctgggcgaacaaacgatgctcgccttccagaaaaccgaggatgcgaaccacttcatccggggtcagcaccaccggcaagcgccgcgacggccgaggtcttccgatctcctgaagccagggcagatccgtgcacagcaccttgccgtagaagaacagcaaggccgccaatgcctgacgatgcgtggagaccgaaaccttgcgctcgttcgccagccaggacagaaatgcctcgacttcgctgctgcccaaggttgccgggtgacgcacaccgtggaaacggatgaaggcacgaacccagtggacataagcctgttcggttcgtaagctgtaatgcaagtagcgtatgcgctcacgcaactggtccagaaccttgaccgaacgcagcggtggtaacggcgcagtggcggttttcatggcttgttatgactgtttttttggggtacagtctatgcctcgggcatccaagcagcaagcgcgttacgccgtgggtcgatgtttgatgttatggagcagcaacgatgttacgcagcagggcagtcgccctaaaacaaagttaaacatcatgagggaagcggtgatcgccgaagtatcgactcaactatcagaggtagttggcgtcatcgagcgccatctcgaaccgacgttgctggccgtacatttgtacggctccgcagtggatggcggcctgaagccacacagtgatattgatttgctggttacggtgacggtaaggcttgatgaaacaacgcggcgagctttgatcaacgaccttttggaaacttcggcttcccctggagagagcgagattctccgcgctgtagaagtcaccattgttgtgcacgacgacatcattccgtggcgttatccagctaagcgcgaactgcaatttggagaatggcagcgcaatgacattcttgcaggtatcttcgagccagccacgatcgacattgatctggctatcttgctgacaaaagcaagagaacatagcgttgccttggtaggtccagcggcggaggaactctttgatccggttcctgaacaggatctatttgaggcgctaaatgaaaccttaacgctatggaactcgccgcccgactgggctggcgatgagcgaaatgtagtgcttacgttgtcccgcatttggtacagcgcagtaaccggcaaaatcgcgccgaaggatgtcgctgccgactgggcaatggagcgcctgccggcccagtatcagcccgtcatacttgaagctagacaggcttatcttggacaagaagaagatcgcttggcctcgcgcgcagatcagttggaagaatttgtccactacgtgaaaggcgagatcaccaaggtagtcggcaaataatgtctaacaattcgttcaagccgacgccgcttcgcggcgcggcttaactcaagcgttagatgcactatacctcatatatactttagattgatttaaaacttcatttttaatttaaaaggatctaggtgaagatcctttttgataatctcatgaccaaaatcccttaacgtgagttttcgttccactgagcgtcagaccccgtagaaaagatcaaaggatcttcttgagatcctttttttctgcgcgtaatctgctgcttgcaaacaaaaaaaccaccgctaccagcggtggtttgtttgccggatcaagagctaccaactctttttccgaaggtaactggcttcagcagagcgcagataccaaatactgtccttctagtgtagccgtagttaggccaccacttcaagaactctgtagcaccgcctacatacctcgctctgctaatcctgttaccagtggctgctgccagtggcgataagtcgtgtcttaccgggttggactcaagacgatagttaccggataaggcgcagcggtcgggctgaacggggggttcgtgcacacagcccagcttggagcgaacgacctacaccgaactgagatacctacagcgtgagctatgagaaagcgccacgcttcccgaagggagaaaggcggacaggtatccggtaagcggcagggtcggaacaggagagcgcacgagggagcttccagggggaaacgcctggtatctttatagtcctgtcgggtttcgccacctctgacttgagcgtcgatttttgtgatgctcgtcaggggggcggagcctatggaaaaacgccagcaacgcggcctttttacggttcctggccttttgctggccttttgctcacatgttctttcctgcgttatcccctgattctgtggataaccgtattaccgcctttgagtgagctgataccgctcgccgcagccgaacgaccgagcgcagcgagtcagtgagcgaggaagcggaagagcgcctgatccatccagctgatatcccctaggttgaacagaagtcattatcgcacggaatgccaagcactcccgaggggaaccctgtggttggcatgcacatacaaatggacgaacggataaa

SEQ ID NO: 3 - DNA, 20881 bp, synthetic construct
  source 1..20881: mol_type = other DNA
gtttacccgccaatatatcctgtcaaacactgcggccgcacttgaccgcggatggagccggagctgtggtgaggccatcgacgggaggtgggggagaacacagtctcagtgttctttgtgagtccgcaaggtttttagcttttctgtattaattaaggttgctgttggctgtagaatacggtcgtggaagagctgtatcggtagctactacgtaagctattatatactggaagtctggagctcgtcgatctccggtcgtcttcctccatttctcctcgtcttgctttgactgctgctaccatttgcttctgttttctgatgaagcatgccatgtcggccaccagtgtttgtgtggtttttgcagggaatggctttcaagtgctgtgattgaatggccctcgtcgtcctcggctgagctcacatggacgcgtcatgtgagtgagatatatgatcatatgatgagtggggttcgggtgagtgcgtacttgaagtaggatcccgctttcactcattcattcattggcctttaaaccgggaaattttcgcgaggagatggagggaagcaagcagggtgacgagtgcagagtgccgcgagcgctttgtcaaaaggcaccgccgtaggcaaaaaaatcaatggccctgactgactcgatggtagtactactgtagagactagagagggttgctccccatatcttcgtgtgacttttactccagcattgcatttccgtcattgagacgttaattaatagcagctttcgggacagatgactgtggccatgtttcgtcacggccgcttcgtgccagctgggggtactatagtactgtgattttgttagtaaaaactttcattaggccaccattgacgaccgggccttcgcttttgctgcgctaattaaccatttcccggcgaccgaagggaacatgaacatgccccgacacatgagggcatgaggactagtgttctccctgtcgttcgttgacttgactagtgatagtttaaacgctcttcaactggaagagcggttactaccggttcactagctagctgctaatcgagctagttaccctatgaggtgacatgaagcgctcacggttactatgacggttagcttcacgactgttggtggcagtagcgtacgacttagctatagttccggacttacctagctaataacttcgtatagcatacattatacgaagttatggttaccgagctcccctggccgaagcttacactgatagtttaaactgaaggcgggaaacgacaatctgatcatgagcggagaattaagggagtcacgttatgacccccgccgatgacgcgggacaagccgttttacgtttggaactgacagaaccgcaacgattgaaggagccactcagccgcgggtttctggagtttaatgagctaagcacatacgtcagaaaccattattgcgcgttcaaaagtcgcctaaggtcactatcagctagcaaatatttcttgtcaaaaatgctccactgacgttccataaattcccctcggtatccaattagagtctcatattcactcccatggcggccaatgcgggcggcggtggagcgggaggaggcagcggcagcggcagcgtggctgcgccggcggtgtgccgccccagcggctcgcggtggacgccgacgccggagcagatcaggatgctgaaggagctctactacggctgcggcatccggtcgcccagctcggagcagatccagcgcatcaccgccatgctgcggcagcacggcaagatcgagggcaagaacgtcttctactggttccagaaccacaaggcccgcgagcgccagaagcgccgcctcaccagcctcgacgtcaacgtgcccgccgccggcgcggccgacgccaccaccagccaactcggcgtcctctcgctgtcgtcgccgccgccttcaggcgcggcgcctccctcgcccaccctcggcttctacgccgccggcaatggcggcggatcggctgtgctgctggacacgagttccgactggggcagcagcggcgctgctatggccaccgagacatgcttcctgcaggactacatgggcgtgacggacacgggcagctcgtcgcagtggccacgcttctcgtcgtcggacacgataatggcggcggccgcggcgcgggcggcgacgacgcgggcgcccgagacgctccctctcttcccgacctgcggcgacgacggcggcagcggtagcagcagctacttgccgttctggggtgccgcgtccacaactgccggcgccacttcttccgttgcgatccaacagcaacaccagctgcaggagcagtacagcttttacagcaacagcaacagcacccagctggccggcaccggcaaccaagacgtatcggcaacagcagcagcagccgccgccctggagctgagcctcagctcatggtgctccccttaccctgctgcagggagtatgtgagagcaacgcgagctgccactgctcttcactgatgtctctggaatggaaggaggaggaagtgagaacagatcattcgacaaagcagcattagtccgttgatcggtggaagaccactcgtcagtgttgagttgaatgtttgatcaataaaatacggcaatgctgtaagggttgttttttatgccattgataatacactgtactgttcagttgttgaactctatttcttagccatgccaagtgcttttcttattttgaataacattacagcaaaaagttgaaagacaaaaaaaaaacccccgaacagagtgctttgggtcccaagcttctttagactgtgttcggcgttccccctaaatttctccccctatatctcactcacttgtcacatcagcgttctctttccccctatatctccacgctctacagcagttccacctatatcaaacctctataccccaccacaacaatattatatactttcatcttcaactaactcatgtaccttccaatttttttctactaataattatttacgtgcacagaaacttagcaaggagagagagagcgggaatttaaatgctcggcgttaggcttttagtccgctaggtggctagaccgaggttaggacgctagttcactaggggcctagtggtgttttaagacgtcacggtcaccgcggccgcatcgagcagctggcttgtggggaccagacaaaaaaggaatggtgcagaattgttaggcgcacctaccaaaagcatctttgcctttattgcaaagataaagcagattcctctagtacaagtggggaacaaaataacgtggaaaagagctgtcctgacagcccactcactaatgcgtatgacgaacgcagtgacgaccacaaaactcgagcaacgagatcatgagccaatcaaagaggagtgatgtagacctaaagcaataatggagccatgacgtaagggcttacgcccatacgaaataattaaaggctgatgtgacctgtcggtctctcagaacctttactttttatgtttggcgtgtatttttaaatttccacggcaatgacgatgtgaccgtcgacccactaaaacattgctttgtcaaaagctaaaaaagatgatgcccgacagccacttgtgtgaagcatgagaagccggtccctccactaagaaaattagtgaagcatcttccagtggtccctccactcacagctcaatcagtgagcaacaggacgaaggaaatgacgtaagccatgacgtctaatcccattcgaaacgcgtggaccgaagcttgcatgcctgcagtgcagcgtgacccggtcgtgcccctctctagagataatgagcattgcatgtctaagttataaaaaattaccacatattttttttgtcacacttgtttgaagtgcagtttatctatctttatacatatatttaaactttactctacgaataatataatctatagtactacaataatatcagtgttttagagaatcatataaatgaacagttagacatggtctaaaggacaattgagtattttgacaacaggactctacagttttatctttttagtgtgcatgtgttctcctttttttttgcaaatagcttcacctatataatacttcatccattttattagtacatccatttagggtttagggttaatggtttttatagactaatttttttagtacatctattttattctattttagcctctaaattaagaaaactaaaactctattttagtttttttatttaataatttagatataaaatagaataaaataaagtgactaaaaattaaacaaataccctttaagaaattaaaaaaactaaggaaacatttttcttgtttcgagtagataatgccagcctgttaaacgccgtcgacgagtctaacggacaccaaccagcgaaccagcagcgtcgcgtcgggccaagcgaagcagacggcacggcatctctgtcgctgcctctggacccctctcgagagttccgctccaccgttggacttgctccgctgtcggcatccagaaattgcgtggcggagcggcagacgtgagccggcacggcaggcggcctcctcctcctctcacggcaccggcagctacgggggattcctttcccaccgctccttcgctttcccttcctcgcccgccgtaataaatagacaccccctccacaccctctttccccaacctcgtgttgttcggagcgcacacacacacaaccagatctcccccaaatccacccgtcggcacctccgcttcaaggtacgccgctcgtcctcccccccccccctctctaccttctctagatcggcgttccggtccatgcatggttagggcccggtagttctacttctgttcatgtttgtgttagatccgtgtttgtgttagatccgtgctgctagcgttcgtacacggatgcgacctgtacgtcagacacgttctgattgctaacttgccagtgtttctctttggggaatcctgggatggctctagccgttccgcagacgggatcgatttcatgattttttttgtttcgttgcatagggtttggtttgcccttttcctttatttcaatatatgccgtgcacttgtttgtcgggtcatcttttcatgcttttttttgtcttggttgtgatgatgtggtctggttgggcggtcgttctagatcggagtagaattctgtttcaaactacctggtggatttattaattttggatctgtatgtgtgtgccatacatattcatagttacgaattgaagatgatggatggaaatatcgatctaggataggtatacatgttgatgcgggttttactgatgcatatacagagatgctttttgttcgcttggttgtgatgatgtggtgtggttgggcggtcgttcattcgttctagatcggagtagaatactgtttcaaactacctggtgtatttattaattttggaactgtatgtgtgtgtcatacatcttcatagttacgagtttaagatggatggaaatatcgatctaggataggtatacatgttgatgtgggttttactgatgcatatacatgatggcatatgcagcatctattcatatgctctaaccttgagtacctatctattataataaacaagtatgttttataattattttgatcttgatatacttggatgatggcatatgcagcagctatatgtggatttttttagccctgccttcatacgctatttatttgcttggtactgtttcttttgtcgatgctcaccctgttgtttggtgttacttctgcaggtcgactttaacttagcctaggatccatggccactgtgaacaactggctcgctttctccctctccccgcaggagctgccgccctcccagacgacggactccacactcatctcggccgccaccgccgaccatgtctccggcgatgtctgcttcaacatcccccaagattggagcatgaggggatcagagctttcggcgctcgtcgcggagccgaagctggaggacttcctcggcggcatctccttctccgagcagcatcacaaggccaactgcaacatgatacccagcactagcagcacagtttgctacgcgagctcaggtgctagcaccggctaccatcaccagctgtaccaccagcccaccagctcagcgctccacttcgcggactccgtaatggtggcttcctcggccggtgtccacgacggcggtgccatgctcagcgcggccgccgctaacggtgtcgctggcgctgccagtgccaacggcggcggcatcgggctgtccatgattaagaactggctgcggagccaaccggcgcccatgcagccgagggtggcggcggctgagggcgcgcaggggctctctttgtccatgaacatggcggggacgacccaaggcgctgctggcatgccacttctcgctggagagcgcgcacgggcgcccgagagtgtatcgacgtcagcacagggtggagccgtcgtcgtcacggcgccgaaggaggatagcggtggcagcggtgttgccggcgctctagtagccgtgagcacggacacgggtggcagcggcggcgcgtcggctgacaacacggcaaggaagacggtggacacgttcgggcagcgcacgtcgatttaccgtggcgtgacaaggcatagatggactgggagatatgaggcacatctttgggataacagttgcagaagggaagggcaaactcgtaagggtcgtcaagtctatttaggtggctatgataaagaggagaaagctgctagggcttatgatcttgctgctctgaagtactggggtgccacaacaacaacaaattttccagtgagtaactacgaaaaggagctcgaggacatgaagcacatgacaaggcaggagtttgtagcgtctctgagaaggaagagcagtggtttctccagaggtgcatccatttacaggggagtgactaggcatcaccaacatggaagatggcaagcacggattggacgagttgcagggaacaaggatctttacttgggcaccttcagcacccaggaggaggcagcggaggcgtacgacatcgcggcgatcaagttccgcggcctcaacgccgtcaccaacttcgacatgagccgctacgacgtgaagagcatcctggacagcagcgccctccccatcggcagcgccgccaagcgcctcaaggaggccgaggccgcagcgtccgcgcagcaccaccacgccggcgtggtgagctacgacgtcggccgcatcgcctcgcagctcggcgacggcggagccctggcggcggcgtacggcgcgcactaccacggcgccgcctggccgaccatcgcgttccagccgggcgccgccagcacaggcctgtaccacccgtacgcgcagcagccaatgcgcggcggcgggtggtgcaagcaggagcaggaccacgcggtgatcgcggccgcgcacagcctgcaggacctccaccacctgaacctgggcgcggccggcgcgcacgactttttctcggcagggcagcaggccgccgccgctgcgatgcacggcctgggtagcatcgacagtgcgtcgctcgagcacagcaccggctccaactccgtcgtctacaacggcggggtcggcgacagcaacggcgccagcgccgtcggcggcagtggcggtggctacatgatgccgatgagcgctgccggagcaaccactacatcggcaatggtgagccacgagcaggtgcatgcacgggcctacgacgaagccaagcaggctgctcagatggggtacgagagctacctggtgaacgcggagaacaatggtggcggaaggatgtctgcatgggggactgtcgtgtctgcagccgcggcggcagcagcaagcagcaacgacaacatggccgccgacgtcgggcatggcggcgcgcagctcttcagtgtctggaacgacacttaagcgtacctagtggtacctgacatcttatagtctgcaacctctcgtgtctgaattcctatctttatcaagtgttattgcttccacgactataggacagctttcgtcgaaagcttttgctcatgtgatctcgaaggattcatctagtctgatttttcgtgacttgtatcggttttattggattcatccaacatatatcaataaaaaatgagttgtgtttcctttcttcctagttcagttaaaattatttccctcctgcgcttgtgctgtaattgtctgtgtacctgttgtttgtgactgtgttagttcccttggatatgatttcgtatttgatatgtacatggagatagcttagcttcattattggagtatgaagttagtatgacatagtcactctcctggaaaattgacactgcaaaccatatttttattctgaaccacaaatcctagtcagtccgctggcatatgccgtccgtttgctgaatccagaacgtgggtttggagatgtacggctgagatgcctctatgcgaaggggatttcgtggtgaaacgagatgggagtagagcaacgcccgtggaagatgcttcaaacttccacacttttgagcaacgatcggcagtagtaaggtagacgatttcaagatcaaagcatatgaagataaacaacatcaacaacaaaatttgttggggttctatagagagaaacagagctacatacatacactgttttgtatctaccatctgagatgatgaaaagatgaaaaactaaagaatgccccggcgccaacgccaggacacgccgcgcgcgcgtcacccgagccatctcttgacccagccggcgctgtatatttacacacgttgcagcatcgatcaccacctgttcgatcgcgtcgccgtcaccggcgcgccgcgacttattgaactagtctagggcgcggctaacaacctagcttagattgccttgtctaaacccttaggctaacgcgccactctagaaggccgatctccccgggttaccgagctccaccttgctagttggatattacctcttctcttcaaagtatccttgaacgctcaccggttatcaaatctctacactatagctctgtagtcttgctagatagttagttctttagctctctctagaggttcacaaactcaatacaacacacagtggagtagggtattacgctccggcggcccgaaccactctaaatccttgtgtcctcgtgtgctcttccaccattaatgactgtaattgcagggacacgaagagttgtagcgcttttgccaacaagatccgctatatgctagtagagtggaacctgcacagcaacaagcatccaataatctgagaataagaattatgtgtggtgatggttctcatctctgcaactcgccattttcgcgagagaaccaaatccaagttggtgaagatcatgatttgggctcatgggctggcatagtagctattacctttgcaattgtggttcgaatctatccgatattctccttttcagggagagctaatgcttatgcttattgggtattttggtttgacactgcttcacgcccaaaaaaaggcaactatgtctgagttggatatggcccaaaaaaaggcagctatgtctgagttggatatggaagtcttctttcgtttagggtgaagtaagaccaagctcatgagcttattatcttaggtcggaacaaattagttgataggcatggcacatttatcaaattataatgattttaacagaaaagcaacacctctttttcagcagcaccagctttgcaagctgcaattgacactccaagcatagtatttgctccaaactcagcctgcatttcgcacaatatcatatctatttccatttggataaaatatattttccagaaatatgggaacagaatcaagatacagaaaaaagttgtggtagtagtggtaagtggaaacacaagtacagtgaaaagatagcattatttctgaacagtcaaattaaccgaaataagtagtatcacatactgcccctaaattgactacacccaatgtaaagaattgcttgagcatattgagccatcagttgtttgtttgtgtaacggatttgacaatgcagagttcaggagcaaaaaaccgcaaaggagagaaagagggaaaggatctcctagtatcccaccttgtggcgcgccctgtcaagtgcatgatggcctggtcgatctgcgtctgctgctgcggttccatcccaacgagtgcctccgacaccttgtcgttgatcacccgcaccgcgtaggcgacccccctggcgaggaacttccgcctctcggaggccccggccgcgtcggcggcggcgccctcgagcgcgcccacgctagccgtagatgctcggtgcacggccttgttggtgtgcaactcgacctcaacggccggtgcgctacgcccgtcaaggatctggcgcgcccgcaccctcgtgatcacggtgggcgcctcccgcctcatgtggccgacgatgaaaagcgccgggttaggggccttggcgcgcaccgccgtattcagggcctcctcgctcttgcgcgagagcaggtgcttccccaggtactcctgcactgacaaggctgccacagcggtggaatttgtcctcacgacttcgccacgtcgtcctcacctccctggcttcccacgactccgccgtatcgaggtgctcggtgggtcgtcttaatccgaagtccgaactaggaagacgagacagagaggtctgaggaatgggcctcgtttgatgttgagctgaattatttttccagcataagcccaggtcttggtccatgaacaaaattactagaaacccagcccagtactacgatctaaaagagggactgccactggatagctctctctagcattctccacgctccaatacagcggcgtcgtgtctatccgggtctatccgcgaacacgtgagaactctccagaaactgctttctcctccacttcatctctctcgctttccctctataaaaagaccccttctaggaattgagggagacagcaagcaccaagcagcgatccgaagctcaatcaattcactcaaacctcttccccaaatcttcgattagatcttcgttgacaagaagactagaaccgaacctgacatgtccaacctgctcacggttcaccagaaccttccggctcttccagtggacgcgacgtccgatgaagtcaggaagaacctcatggacatgttccgcgacaggcaagcgttcagcgagcacacctggaagatgctgctctccgtctgccgctcctgggctgcatggtgcaagctgaacaacaggaagtggttccccgctgagcccgaggacgtgagggattaccttctgtacctgcaagcgcgaggtttgtttctgcttctacctttgatatatatataataattatcattaattagtagtaatataatatttcaaatatttttttcaaaataaaagaatgtagtatatagcaattgcttttctgtagtttataagtgtgtatattttaatttataacttttctaatatatgaccaaaacatggtgatgcctaggtctggcagtgaagaccatccagcaacaccttggacaactgaacatgcttcacaggcgctccggcctcccgcgccccagcgactcgaacgccgtgagcctcgtcatgcgccgcatcaggaaggaaaacgtcgatgccggcgaaagggcaaagcaggccctcgcgttcgagaggaccgatttcgaccaggtccgcagcctgatggagaacagcgacaggtgccaggacattaggaacctggcgttcctcggaattgcatacaacacgctcctcaggatcgcggaaattgcccgcattcgcgtgaaggacattagccgcaccgacggcggcaggatgcttatccacattggcaggaccaagacgctcgtttccaccgcaggcgtcgaaaaggccctcagcctcggagtgaccaagctcgtcgaacgctggatctccgtgtccggcgtcgcggacgacccaaacaactacctcttctgccgcgtccgcaagaacggggtggctgcccctagcgccaccagccaactcagcacgagggccttggaaggtattttcgaggccacccaccgcctgatctacggcgcgaaggatgacagcggtcaacgctacctcgcatggtccgggcactccgcccgcgttggagctgctagggacatggcccgcgccggtgtttccatccccgaaatcatgcaggcgggtggatggacgaacgtgaacattgtcatgaactacattcgcaaccttgacagcgagacgggcgcaatggttcgcctcctggaagatggtgactgaggtacccaacctagacttgtccatcttctggattggccaacttaattaatgtatgaaataaaaggatgcacacatagtgacatgctaatcactataatgtgggcatcaaagttgtgtgttatgtgtaattactagttatctgaataaaagagaaagagatcatccatatttcttatcctaaatgaatgtcacgtgtctttataattctttgatgaaccagatgcatttcattaaccaaatccatatacatataaatattaatcatatataattaatatcaattgggttagcaaaacaaatctagtctaggtgtgttttgcgatccgatatcgatcaccttgctagttggatattacctcttctcttcaaagtatccttgaacgctcaccggttatcaaatctctacactatagctctgtagtcttgctagatagttagttctttagctctcgggccctggccgaagcttcgtgcgcacgataacttcgtatagcatacattatacgaagttataacagcggaccgggttaccgaattcctgcccttaaggccaattgttcaagattcattcaacaattgaaacatctcccatgattaaatcagtataaggttgctatggtcttgcttgacaaagtttttttttgagggaatttcaactaaatttttgagtgaaactatcaaatactgattttaaaaaatttttataaaaggaagcgcagagataaaaggccatctatgctacaaaagtacccaaaaatgtaatcctaaagtatgaattgcattttttttttgtttggacgaaaggaaaggagtattaccacaagaatgatatcatcttcatatttagatcttttttgggtaaagcttgagattctctaaatatagagaaatcagaagaaaaaaaaaccgtgttttggtggttttgatttctagcctccacaataactttgacggcgtcgacaagtctaacggacaccaagcagcgaaccaccagcgccgagccaagcgaagcagacggccgagacgttgacaccttcggcgcggcatctctcgagagttccgctccggcgctccacctccaccgctggcggtttcttattccgttccgttccgcctcctgctctgctcctctccacaccacacggcacgaaaccgttacggcaccggcagcacccagcacgggagaggggattcctttcccaccgttccttccctttccgccccgccgctataaatagccagccccatccccagcttttttccccaatctcatctcctctctcctgttgttcggagcacacgcacaatccgatcgatccccaaatccccttcgtctctcctcgcgagcctcgtggatcccagcttcaaggtacggcgatcgatcatcccccctccttctctctaccttcttttctctagactacatcggatggcgatccatggttagggcctgctagtttcccttcctgttttgtcgatggctgcgaggcacaatagatctgatggcgttatgacggctaacttgtcatgttgttgcgatttatagtccctttaggagatcagtttaatttctcggatggttcgagatcggtggtccatggttagtaccctaagatccgcgctgttagggttcgtagatggaggcgacctgttctgattgttaacttgtcagtacctgggaaatcctgggatggttctagctcgtccgcagatgagatcgatttcatgatcctctgtatcttgtttcgttgcctaggttccgtctaatctatccgtggtatgatgtagatgttttgatcgtgctaactacgtcttgtaaagttaattgtcaggtcataatttttagcatgcctttttttttgtttggttttgtctaattgggctgtcgttctagatcagagtagaagactgttccaaactacctgctggatttattgaacttggatctgtatgtgtgtcacatatcttcataaattcatgattaagatggattgaaatatcttttatctttttggtatggatagttctatatgttggtgtggctttgttagatgtatacatgcttagatacatgaagcaacgtgctgctactgtttagtaattgctgttcatttgtctaataaacagataaggatatgtatttatgttgctgttggttttgctggtactttgttggatacaaatgcttcaatacagaaaacagcatgctgctacgatttaccatttatctaatcttatcatatgtctaatctaataaacaaacatgcttttaaattatcttcatatgcttggatgatggcatacacagcggctatgtgtggttttttaaatacccagcatcatgggcatgcatgacactgctttaatatgctttttatttgcttgagactgtttcttttgtttatactgaccctttagttcggtgactcttctgcaggtcgactttaacttagcctaggatccatggcccagtccaagcacggcctgaccaaggagatgaccatgaagtaccgcatggagggctgcgtggacggccacaagttcgtgatcaccggcgagggcatcggctaccccttcaagggcaagcaggccatcaacctgtgcgtggtggagggcggccccttgcccttcgccgaggacatcttgtccgccgccttcatgtacggcaaccgcgtgttcaccgagtacccccaggacatcgtcgactacttcaagaactcctgccccgccggctacacctgggaccgctccttcctgttcgaggacggcgccgtgtgcatctgcaacgccgacatcaccgtgagcgtggaggagaactgcatgtaccacgagtccaagttctacggcgtgaacttccccgccgacggccccgtgatgaagaagatgaccgacaactgggagccctcctgcgagaagatcatccccgtgcccaagcagggcatcttgaagggcgacgtgagcatgtacctgctgctgaaggacggtggccgcttgcgctgccagttcgacaccgtgtacaaggccaagtccgtgccccgcaagatgcccgactggcacttcatccagcacaagctgacccgcgaggaccgcagcgacgccaagaaccagaagtggcacctgaccgagcacgccatcgcctccggctccgccttgccctccggactcagatctcgatagggtaccaatggccagttaacagatccagctgctgctgttctagggttcacaagtctgcctatttgtcttccccaatggagctatggttgtctggtctggtccttggtcgtgtcccgtttcattgtgtactatttacctgtaatgtgtatccttaagtctggtttgatggtgtctgaaacgttttgctgtggtagagcagcatggaagaactataatgaataagtgatccctaatcattgtgtccaaattttgcttctgctatacccttttgtgctgtttcttatgttttgcttaaaaatttgatctgacaaacaaatttgtctaaattatgctcttgttctgactgtgtactgtacacatttgtattgctaccggtttggcacatagttttctctttgattgcagatcaaacccttctgattgcagattgcttggctatggctgatgtgctcactgttcttctttagcttgtatattgctgatggtggcttggctacggctgaaaaagttgctgctgcgccgacttggcaactgttgctccagtaatgctttgtcctctcttcctagccgccgacttggcacttggcagctgttgctcctgtaatgcgttgttatctcttatctcttgagatgtactatgattttgaggctgtttgacttgtgccagattgccagtgctgatgctatattatctcaggtttttatgctagtatatgttttactgtgtgctgcctgtgtcgagttacgtaatctattgaaccgctatgcgtgttgatgccctgttgttgcttgccagattgatgcccctgttgcttgcagcttgcaagctgtagtgaaatcctaaaattcgaaaccaaatctattctgaacttttgaagatctgtgatgtccggaagaaaagattcaaacagataaacgggactctccagaatctataaaataaatgatcgacaaacgctttgctttggtaggcttcctagttagttagcggaccgaagcttcggtccgggcctagaaggccagcttcggccgcccctcggtaccctgggatctgcccttactttaacgcctctaaccaacacccctttatctttataaggaacaataaacagaatttgccccactgttctaaatcacctaataatatccccagctaaaaacaataaaggtttcctagaattaagacaagcatgactgttcctccaggagggtttggaacattgttgcagtcttgcagatacgggcgaagggtgagaaacagagcggagggctggaggtgacctcggtagtcgacgccggagttgagcttgacaacgacggggcggcccctgatggacttgaggaagtccgatggcgtcttcaccgtcccgccggcgcccgaggcgggcctgtcgctgccgccgccgccgctgctcatcttgcgcgctgtgcccccggcggtgtccctgtgttgcggatcgcgggtgggccaggtggatgcgagggcgacccgtttggactccggccggagccgccggatccctggtcggtgtcagtgccgtttactctgggccccacgtgtcagtaccgtctgtagatgacaacaacccgtcgtccacagtcatgtccaaaatatcctttcttcttttttttcgattcggatatctatcttccttttttttttccaaaaatcttcttgacgcaccagcgcgcacgtttgtggtaaacgccgacacgtcggtcccacgtcgatagaccccacccaccagtgagtagcgtgtacgtattcgggggtgacggacgtgtcgccgtcgtcttgctagtcccattcccatctgagccacacatctctgaacaaaaaaaaggagggaggcctccacgcacatccccctccgtgccacccgccccaaaccctcgcgccgcctccgagacagccgccgcaaccatggccaccgccgccgccgcgtctaccgcgctcactggcgccactaccgctgcgcccaaggcgaggcgccgggcgcacctcctggccacccgccgcgccctcgccgcgcccatcaggtgctcagcggcgtcacccgccatgccgatggctcccccggccaccccgctccggccgtggggccccaccgagccccgcaagggtgctgacatcctcgtcgagtccctcgagcgctgcggcgtccgcgacgtcttcgcctaccccggcggcgcgtccatggagatccaccaggcactcacccgctcccccgtcatcgccaaccacctcttccgccacgagcaaggggaggcctttgccgcctccggctacgcgcgctcctcgggccgcgtcggcgtctgcatcgccacctccggccccggcgccaccaacctagtctccgcgctcgccgacgcgctgctcgattccgtccccatggtcgccatcacgggacaggtggcgcgacgcatgattggcaccgacgccttccaggagacgcccatcgtcgaggtcacccgctccatcaccaagcacaactacctggtcctcgacgtcgacgacatcccccgcgtcgtgcaggaggctttcttcctcgcctcctctggtcgaccagggccggtgcttgtcgacatccccaaggacatccagcagcagatggcggtgcctgtctgggacaagcccatgagtctgcctgggtacattgcgcgccttcccaagccccctgcgactgagttgcttgagcaggtgctgcgtcttgttggtgaatcgcggcgccctgttctttatgtgggcggtggctgcgcagcatctggtgaggagttgcgacgctttgtggagctgactggaatcccggtcacaactactcttatgggcctcggcaacttccccagcgacgacccactgtctctgcgcatgctaggtatgcatgggacggtgtatgcaaattatgcagtggataaggccgatctgttgcttgcacttggtgtgcggtttgatgatcgcgtgacagggaagattgaggcttttgcaagcagggctaagattgtgcacgttgatattgatccggctgagattggcaagaacaagcagccacatgtgtccatctgtgcagatgttaagcttgctttgcagggcatgaatgctcttcttgaaggaagcacatcaaagaagagctttgactttggctcatggaacgatgagttggatcagcagaagagggaattcccccttgggtataaaacatctaatgaggagatccagccacaatatgctattcaggttcttgatgagctgacgaaaggcgaggccatcatcggcacaggtgttgggcagcaccagatgtgggcggcacagtactacacttacaagcggccaaggcagtggttgtcttcagctggtcttggggctatgggatttggtttgccggctgctgctggtgcttctgtggcaaacccaggtgtcactgttgttgacatcgatggagatggtagctttctcatgaacgttcaggagctagctatgatccgaattgagaacctcccagtgaaggtctttgtgctaaacaaccagcacctggggatggtggtgcagttggaggacaggttctataaggccaacagagcgcacacatacttgggaaacccagagaatgaaagtgagatatatccagatttcgtgacgatcgccaaagggttcaacattccagccgtccgtgtgacaaagaagaacgaagtccgcgcagcgataaagaagatgctcgagactccagggccgtacctcttggatataatcgtcccacaccaggagcatgtgttgcctatgatccctagtggtggggctttcaaggatatgatcctggatggtgatggcaggactgtgtactgacttcgaataggtacccggggatcctctagtgccgtgggtcgtttaagctgccgctgtacctgtgtcgtctggtgccttctggtgtacctgggaggttgtcgtctatcaagtatctgtggttggtgtcatgagtcagtgagtcccaatactgttcgtgtcctgtgtgcattatacccaaaactgttatgggcaaatcatgaataagcttgatgttcgaacttaaaagtctctgctcaatatggtattatggttgtttttgttcgtctcctaatatttgcctgggatcaaattttattggctggtgttcatttgacctccatgttcttgctaggctccattttttactctacagccataatatgtttgattgtttggtttgttctttgttgtacacctggttctgtcgagcttagttttcgacactggcttacagcttaacatgttgctattttattgggttctgattgctattttattgggttctgattgctagtttttgctgaatccaaaaaccatgttatttatttaagcgatccaggttattattatgatggtggctaagtttttttttttccaagggtaaattttctggattctccagtgtttctgtggccgaattcaatcactagagtcgacctgcaaagcttcggtccgggcctagaaggcccgcgccacttacgcttgattccgatgacttcgtaggttcctagctcaagccgctcgtgtccaagcgtcacttacgattagctaatgattacggcatctaggaccgactagttcttatgtgcttctagtctccaaatgtggttgatagttattttgctctaagatcaacagtaatgaagtataaatcatcgttgtggtgtgctactcggttaattgagcattaacacacacaaacatgacgaggatggtataatctccaaaaatgtgtactttgttaggtgggaccctatagccttgattaatgtgctatgttaggcatgcctggaaacgtgtgacgcatatgttttgtgaacctgttgatattatatgtgcttttatattaccatattttattaaaatactaatatttattactagtaagatataacattctatctagcttaaaaactaaccataaatattccataataactagatttaccaaactaatatactaaatatacataataaatacaaaattaacaagacaataatcaatatttatgagcttaatatatttagacattatggttggtcgacgataatcatgctaacttttcgtaattgcttgattgaaatatgcttagaataatgcctctttgttctacatggcaaatagggaccattatggtgtaacaccctgggaaccacaaacaccccgaaatgctactaaactacacaactaaccttcatatataaaatttcgacagcatctcctttgaaaatttgcatagacgtggaagcaacagagtataaacagatctgcgtttaaacgtgcaagcgctactagacaattcagtacattaaaaacgtccgcaatgtgttattaagttgtctaagcgtcaatttgtttacaccacaatatatcctgcca

SEQ ID NO: 4 - DNA, 20950 bp, synthetic construct
  source 1..20950: mol_type = other DNA
gtttacccgccaatatatcctgtcaaacactgcggccgcacttgaccgcggatggagccggagctgtggtgaggccatcgacgggaggtgggggagaacacagtctcagtgttctttgtgagtccgcaaggtttttagcttttctgtattaattaaggttgctgttggctgtagaatacggtcgtggaagagctgtatcggtagctactacgtaagctattatatactggaagtctggagctcgtcgatctccggtcgtcttcctccatttctcctcgtcttgctttgactgctgctaccatttgcttctgttttctgatgaagcatgccatgtcggccaccagtgtttgtgtggtttttgcagggaatggctttcaagtgctgtgattgaatggccctcgtcgtcctcggctgagctcacatggacgcgtcatgtgagtgagatatatgatcatatgatgagtggggttcgggtgagtgcgtacttgaagtaggatcccgctttcactcattcattcattggcctttaaaccgggaaattttcgcgaggagatggagggaagcaagcagggtgacgagtgcagagtgccgcgagcgctttgtcaaaaggcaccgccgtaggcaaaaaaatcaatggccctgactgactcgatggtagtactactgtagagactagagagggttgctccccatatcttcgtgtgacttttactccagcattgcatttccgtcattgagacgttaattaatagcagctttcgggacagatgactgtggccatgtttcgtcacggccgcttcgtgccagctgggggtactatagtactgtgattttgttagtaaaaactttcattaggccaccattgacgaccgggccttcgcttttgctgcgctaattaaccatttcccggcgaccgaagggaacatgaacatgccccgacacatgagggcatgaggactagtgttctccctgtcgttcgttgacttgactagtgatagtttaaacgctcttcaactggaagagcggttactaccggttcactagctagctgctaatcgagctagttaccctatgaggtgacatgaagcgctcacggttactatgacggttagcttcacgactgttggtggcagtagcgtacgacttagctatagttccggacttacctagctaataacttcgtatagcatacattatacgaagttatggttaccgagctgttaccaagcggccgcacactgatagtttaaactgaaggcgggaaacgacaatctgatcatgagcggagaattaagggagtcacgttatgacccccgccgatgacgcgggacaagccgttttacgtttggaactgacagaaccgcaacgattgaaggagccactcagccgcgggtttctggagtttaatgagctaagcacatacgtcagaaaccattattgcgcgttcaaaagtcgcctaaggtcactatcagctagcaaatatttcttgtcaaaaatgctccactgacgttccataaattcccctcggtatccaattagagtctcatattcactcccatggcggccaatgcgggcggcggtggagcgggaggaggcagcggcagcggcagcgtggctgcgccggcggtgtgccgccccagcggctcgcggtggacgccgacgccggagcagatcaggatgctgaaggagctctactacggctgcggcatccggtcgcccagctcggagcagatccagcgcatcaccgccatgctgcggcagcacggcaagatcgagggcaagaacgtcttctactggttccagaaccacaaggcccgcgagcgccagaagcgccgcctcaccagcctcgacgtcaacgtgcccgccgccggcgcggccgacgccaccaccagccaactcggcgtcctctcgctgtcgtcgccgccgccttcaggcgcggcgcctccctcgcccaccctcggcttctacgccgccggcaatggcggcggatcggctgtgctgctggacacgagttccgactggggcagcagcggcgctgctatggccaccgagacatgcttcctgcaggactacatgggcgtgacggacacgggcagctcgtcgcagtggccacgcttctcgtcgtcggacacgataatggcggcggccgcggcgcgggcggcgacgacgcgggcgcccgagacgctccctctcttcccgacctgcggcgacgacggcggcagcggtagcagcagctacttgccgttctggggtgccgcgtccacaactgccggcgccacttcttccgttgcgatccaacagcaacaccagctgcaggagcagtacagcttttacagcaacagcaacagcacccagctggccggcaccggcaaccaagacgtatcggcaacagcagcagcagccgccgccctggagctgagcctcagctcatggtgctccccttaccctgctgcagggagtatgtgagagcaacgcgagctgccactgctcttcactgatgtctctggaatggaaggaggaggaagtgagaacagatcattcgacaaagcagcattagtccgttgatcggtggaagaccactcgtcagtgttgagttgaatgtttgatcaataaaatacggcaatgctgtaagggttgttttttatgccattgataatacactgtactgttcagttgttgaactctatttcttagccatgccaagtgcttttcttattttgaataacattacagcaaaaagttgaaagacaaaaaaaaaaacccccgaacagagtgctttgggtcccaagcttctttagactgtgttcggcgttccccctaaatttctccccctatatctcactcacttgtcacatcagcgttctctttccccctatatctccacgctctacagcagttccacctatatcaaacctctataccccaccacaacaatattatatactttcatcttcaactaactcatgtaccttccaatttttttctactaataattatttacgtgcacagaaacttagcaaggagagagagagcgggaatttaaatgctcggcgttaggcttttagtccgctaggtggctagaccgaggttaggacgctagttcactaggggcctagtggtgttttaagacgtcacggtcactacgaatcgaccgaagcttgcatgggccgcatcgagcagctggcttgtggggaccagacaaaaaaggaatggtgcagaattgttaggcgcacctaccaaaagcatctttgcctttattgcaaagataaagcagattcctctagtacaagtggggaacaaaataacgtggaaaagagctgtcctgacagcccactcactaatgcgtatgacgaacgcagtgacgaccacaaaactcgagcaacgagatcatgagccaatcaaagaggagtgatgtagacctaaagcaataatggagccatgacgtaagggcttacgcccatacgaaataattaaaggctgatgtgacctgtcggtctctcagaacctttactttttatgtttggcgtgtatttttaaatttccacggcaatgacgatgtgaccgtcgacccactaaaacattgctttgtcaaaagctaaaaaagatgatgcccgacagccacttgtgtgaagcatgagaagccggtccctccactaagaaaattagtgaagcatcttccagtggtccctccactcacagctcaatcagtgagcaacaggacgaaggaaatgacgtaagccatgacgtctaatcccagggccagcttgcatgcctgcagtgcagcgtgacccggtcgtgcccctctctagagataatgagcattgcatgtctaagttataaaaaattaccacatattttttttgtcacacttgtttgaagtgcagtttatctatctttatacatatatttaaactttactctacgaataatataatctatagtactacaataatatcagtgttttagagaatcatataaatgaacagttagacatggtctaaaggacaattgagtattttgacaacaggactctacagttttatctttttagtgtgcatgtgttctcctttttttttgcaaatagcttcacctatataatacttcatccattttattagtacatccatttagggtttagggttaatggtttttatagactaatttttttagtacatctattttattctattttagcctctaaattaagaaaactaaaactctattttagtttttttatttaataatttagatataaaatagaataaaataaagtgactaaaaattaaacaaataccctttaagaaattaaaaaaactaaggaaacatttttcttgtttcgagtagataatgccagcctgttaaacgccgtcgacgagtctaacggacaccaaccagcgaaccagcagcgtcgcgtcgggccaagcgaagcagacggcacggcatctctgtcgctgcctctggacccctctcgagagttccgctccaccgttggacttgctccgctgtcggcatccagaaattgcgtggcggagcggcagacgtgagccggcacggcaggcggcctcctcctcctctcacggcaccggcagctacgggggattcctttcccaccgctccttcgctttcccttcctcgcccgccgtaataaatagacaccccctccacaccctctttccccaacctcgtgttgttcggagcgcacacacacacaaccagatctcccccaaatccacccgtcggcacctccgcttcaaggtacgccgctcgtcctcccccccccccctctctaccttctctagatcggcgttccggtccatgcatggttagggcccggtagttctacttctgttcatgtttgtgttagatccgtgtttgtgttagatccgtgctgctagcgttcgtacacggatgcgacctgtacgtcagacacgttctgattgctaacttgccagtgtttctctttggggaatcctgggatggctctagccgttccgcagacgggatcgatttcatgattttttttgtttcgttgcatagggtttggtttgcccttttcctttatttcaatatatgccgtgcacttgtttgtcgggtcatcttttcatgcttttttttgtcttggttgtgatgatgtggtctggttgggcggtcgttctagatcggagtagaattctgtttcaaactacctggtggatttattaattttggatctgtatgtgtgtgccatacatattcatagttacgaattgaagatgatggatggaaatatcgatctaggataggtatacatgttgatgcgggttttactgatgcatatacagagatgctttttgttcgcttggttgtgatgatgtggtgtggttgggcggtcgttcattcgttctagatcggagtagaatactgtttcaaactacctggtgtatttattaattttggaactgtatgtgtgtgtcatacatcttcatagttacgagtttaagatggatggaaatatcgatctaggataggtatacatgttgatgtgggttttactgatgcatatacatgatggcatatgcagcatctattcatatgctctaaccttgagtacctatctattataataaacaagtatgttttataattattttgatcttgatatacttggatgatggcatatgcagcagctatatgtggatttttttagccctgccttcatacgctatttatttgcttggtactgtttcttttgtcgatgctcaccctgttgtttggtgttacttctgcaggtcgactttaacttagcctaggatccatggccactgtgaacaactggctcgctttctccctctccccgcaggagctgccgccctcccagacgacggactccacactcatctcggccgccaccgccgaccatgtctccggcgatgtctgcttcaacatcccccaagattggagcatgaggggatcagagctttcggcgctcgtcgcggagccgaagctggaggacttcctcggcggcatctccttctccgagcagcatcacaaggccaactgcaacatgatacccagcactagcagcacagtttgctacgcgagctcaggtgctagcaccggctaccatcaccagctgtaccaccagcccaccagctcagcgctccacttcgcggactccgtaatggtggcttcctcggccggtgtccacgacggcggtgccatgctcagcgcggccgccgctaacggtgtcgctggcgctgccagtgccaacggcggcggcatcgggctgtccatgattaagaactggctgcggagccaaccggcgcccatgcagccgagggtggcggcggctgagggcgcgcaggggctctctttgtccatgaacatggcggggacgacccaaggcgctgctggcatgccacttctcgctggagagcgcgcacgggcgcccgagagtgtatcgacgtcagcacagggtggagccgtcgtcgtcacggcgccgaaggaggatagcggtggcagcggtgttgccggcgctctagtagccgtgagcacggacacgggtggcagcggcggcgcgtcggctgacaacacggcaaggaagacggtggacacgttcgggcagcgcacgtcgatttaccgtggcgtgacaaggcatagatggactgggagatatgaggcacatctttgggataacagttgcagaagggaagggcaaactcgtaagggtcgtcaagtctatttaggtggctatgataaagaggagaaagctgctagggcttatgatcttgctgctctgaagtactggggtgccacaacaacaacaaattttccagtgagtaactacgaaaaggagctcgaggacatgaagcacatgacaaggcaggagtttgtagcgtctctgagaaggaagagcagtggtttctccagaggtgcatccatttacaggggagtgactaggcatcaccaacatggaagatggcaagcacggattggacgagttgcagggaacaaggatctttacttgggcaccttcagcacccaggaggaggcagcggaggcgtacgacatcgcggcgatcaagttccgcggcctcaacgccgtcaccaacttcgacatgagccgctacgacgtgaagagcatcctggacagcagcgccctccccatcggcagcgccgccaagcgcctcaaggaggccgaggccgcagcgtccgcgcagcaccaccacgccggcgtggtgagctacgacgtcggccgcatcgcctcgcagctcggcgacggcggagccctggcggcggcgtacggcgcgcactaccacggcgccgcctggccgaccatcgcgttccagccgggcgccgccagcacaggcctgtaccacccgtacgcgcagcagccaatgcgcggcggcgggtggtgcaagcaggagcaggaccacgcggtgatcgcggccgcgcacagcctgcaggacctccaccacctgaacctgggcgcggccggcgcgcacgactttttctcggcagggcagcaggccgccgccgctgcgatgcacggcctgggtagcatcgacagtgcgtcgctcgagcacagcaccggctccaactccgtcgtctacaacggcggggtcggcgacagcaacggcgccagcgccgtcggcggcagtggcggtggctacatgatgccgatgagcgctgccggagcaaccactacatcggcaatggtgagccacgagcaggtgcatgcacgggcctacgacgaagccaagcaggctgctcagatggggtacgagagctacctggtgaacgcggagaacaatggtggcggaaggatgtctgcatgggggactgtcgtgtctgcagccgcggcggcagcagcaagcagcaacgacaacatggccgccgacgtcgggcatggcggcgcgcagctcttcagtgtctggaacgacacttaagcgtacctagtggtacctgacatcttatagtctgcaacctctcgtgtctgaattcctatctttatcaagtgttattgcttccacgactataggacagctttcgtcgaaagcttttgctcatgtgatctcgaaggattcatctagtctgatttttcgtgacttgtatcggttttattggattcatccaacatatatcaataaaaaatgagttgtgtttcctttcttcctagttcagttaaaattatttccctcctgcgcttgtgctgtaattgtctgtgtacctgttgtttgtgactgtgttagttcccttggatatgatttcgtatttgatatgtacatggagatagcttagcttcattattggagtatgaagttagtatgacatagtcactctcctggaaaattgacactgcaaaccatatttttattctgaaccacaaatcctagtcagtccgctggcatatgccgtccgtttgctgaatccagaacgtgggtttggagatgtacggctgagatgcctctatgcgaaggggatttcgtggtgaaacgagatgggagtagagcaacgcccgtggaagatgcttcaaacttccacacttttgagcaacgatcggcagtagtaaggtagacgatttcaagatcaaagcatatgaagataaacaacatcaacaacaaaatttgttggggttctatagagagaaacagagctacatacatacactgttttgtatctaccatctgagatgatgaaaagatgaaaaactaaagaatgccccggcgccaacgccaggacacgccgcgcgcgcgtcacccgagccatctcttgacccagccggcgctgtatatttacacacgttgcagcatcgatcaccacctgttcgatcgcgtcgccgtcaccggcgcgccgcgacttattgaactagtctagggcgcggctaacaacctagcttagattgccttgtctaaacccttaggctaacgcgccactctagaaggccgatctcccccgaacgcgccagatccgatatcgatgggccctggccgaagcttggtcacccgcaccttgctagttggatattacctcttctcttcaaagtatccttgaacgctcaccggttatcaaatctctacactatagctctgtagtcttgctagatagttagttctttagctctctctagaggttcacaaactcaatacaacacacagtggagtagggtattacgctccggcggcccgaaccactctaaatccttgtgtcctcgtgtgctcttccaccattaatgactgtaattgcagggacacgaagagttgtagcgcttttgccaacaagatccgctatatgctagtagagtggaacctgcacagcaacaagcatccaataatctgagaataagaattatgtgtggtgatggttctcatctctgcaactcgccattttcgcgagagaaccaaatccaagttggtgaagatcatgatttgggctcatgggctggcatagtagctattacctttgcaattgtggttcgaatctatccgatattctccttttcagggagagctaatgcttatgcttattgggtattttggtttgacactgcttcacgcccaaaaaaaggcaactatgtctgagttggatatggcccaaaaaaaggcagctatgtctgagttggatatggaagtcttctttcgtttagggtgaagtaagaccaagctcatgagcttattatcttaggtcggaacaaattagttgataggcatggcacatttatcaaattataatgattttaacagaaaagcaacacctctttttcagcagcaccagctttgcaagctgcaattgacactccaagcatagtatttgctccaaactcagcctgcatttcgcacaatatcatatctatttccatttggataaaatatattttccagaaatatgggaacagaatcaagatacagaaaaaagttgtggtagtagtggtaagtggaaacacaagtacagtgaaaagatagcattatttctgaacagtcaaattaaccgaaataagtagtatcacatactgcccctaaattgactacacccaatgtaaagaattgcttgagcatattgagccatcagttgtttgtttgtgtaacggatttgacaatgcagagttcaggagcaaaaaaccgcaaaggagagaaagagggaaaggatctcctagtatcccaccttgtggcgcgccctgtcaagtgcatgatggcctggtcgatctgcgtctgctgctgcggttccatcccaacgagtgcctccgacaccttgtcgttgatcacccgcaccgcgtaggcgacccccctggcgaggaacttccgcctctcggaggccccggccgcgtcggcggcggcgccctcgagcgcgcccacgctagccgtagatgctcggtgcacggccttgttggtgtgcaactcgacctcaacggccggtgcgctacgcccgtcaaggatctggcgcgcccgcaccctcgtgatcacggtgggcgcctcccgcctcatgtggccgacgatgaaaagcgccgggttaggggccttggcgcgcaccgccgtattcagggcctcctcgctcttgcgcgagagcaggtgcttccccaggtactcctgcactgacaaggctgccacagcggtggaatttgtcctcacgacttcgccacgtcgtcctcacctccctggcttcccacgactccgccgtatcgaggtgctcggtgggtcgtcttaatccgaagtccgaactaggaagacgagacagagaggtctgaggaatgggcctcgtttgatgttgagctgaattatttttccagcataagcccaggtcttggtccatgaacaaaattactagaaacccagcccagtactacgatctaaaagagggactgccactggatagctctctctagcattctccacgctccaatacagcggcgtcgtgtctatccgggtctatccgcgaacacgtgagaactctccagaaactgctttctcctccacttcatctctctcgctttccctctataaaaagaccccttctaggaattgagggagacagcaagcaccaagcagcgatccgaagctcaatcaattcactcaaacctcttccccaaatcttcgattagatcttcgttgacaagaagactagaaccgaacctgacatgtccaacctgctcacggttcaccagaaccttccggctcttccagtggacgcgacgtccgatgaagtcaggaagaacctcatggacatgttccgcgacaggcaagcgttcagcgagcacacctggaagatgctgctctccgtctgccgctcctgggctgcatggtgcaagctgaacaacaggaagtggttccccgctgagcccgaggacgtgagggattaccttctgtacctgcaagcgcgaggtttgtttctgcttctacctttgatatatatataataattatcattaattagtagtaatataatatttcaaatatttttttcaaaataaaagaatgtagtatatagcaattgcttttctgtagtttataagtgtgtatattttaatttataacttttctaatatatgaccaaaacatggtgatgcctaggtctggcagtgaagaccatccagcaacaccttggacaactgaacatgcttcacaggcgctccggcctcccgcgccccagcgactcgaacgccgtgagcctcgtcatgcgccgcatcaggaaggaaaacgtcgatgccggcgaaagggcaaagcaggccctcgcgttcgagaggaccgatttcgaccaggtccgcagcctgatggagaacagcgacaggtgccaggacattaggaacctggcgttcctcggaattgcatacaacacgctcctcaggatcgcggaaattgcccgcattcgcgtgaaggacattagccgcaccgacggcggcaggatgcttatccacattggcaggaccaagacgctcgtttccaccgcaggcgtcgaaaaggccctcagcctcggagtgaccaagctcgtcgaacgctggatctccgtgtccggcgtcgcggacgacccaaacaactacctcttctgccgcgtccgcaagaacggggtggctgcccctagcgccaccagccaactcagcacgagggccttggaaggtattttcgaggccacccaccgcctgatctacggcgcgaaggatgacagcggtcaacgctacctcgcatggtccgggcactccgcccgcgttggagctgctagggacatggcccgcgccggtgtttccatccccgaaatcatgcaggcgggtggatggacgaacgtgaacattgtcatgaactacattcgcaaccttgacagcgagacgggcgcaatggttcgcctcctggaagatggtgactgaggtacccaacctagacttgtccatcttctggattggccaacttaattaatgtatgaaataaaaggatgcacacatagtgacatgctaatcactataatgtgggcatcaaagttgtgtgttatgtgtaattactagttatctgaataaaagagaaagagatcatccatatttcttatcctaaatgaatgtcacgtgtctttataattctttgatgaaccagatgcatttcattaaccaaatccatatacatataaatattaatcatatataattaatatcaattgggttagcaaaacaaatctagtctaggtgtgttttgcgatccgatatcgacgtctaaaaacggcccctaactaacgcttagttgcccgctagattagtcccccgttagtgcctagttagacacacgacgaactaggggctagtgccaccttgctagttggatattacctcttctcttcaaagtatccttgaacgctcaccggttatcaaatctctacactatagctctgtagtcttgctagatagttagttctttagctctcgcacgataacttcgtatagcatacattatacgaagttataacagcggaccgggttaccgaattcctgcccttaaggccaattgttcaagattcattcaacaattgaaacatctcccatgattaaatcagtataaggttgctatggtcttgcttgacaaagtttttttttgagggaatttcaactaaatttttgagtgaaactatcaaatactgattttaaaaaatttttataaaaggaagcgcagagataaaaggccatctatgctacaaaagtacccaaaaatgtaatcctaaagtatgaattgcattttttttttgtttggacgaaaggaaaggagtattaccacaagaatgatatcatcttcatatttagatcttttttgggtaaagcttgagattctctaaatatagagaaatcagaagaaaaaaaaaccgtgttttggtggttttgatttctagcctccacaataactttgacggcgtcgacaagtctaacggacaccaagcagcgaaccaccagcgccgagccaagcgaagcagacggccgagacgttgacaccttcggcgcggcatctctcgagagttccgctccggcgctccacctccaccgctggcggtttcttattccgttccgttccgcctcctgctctgctcctctccacaccacacggcacgaaaccgttacggcaccggcagcacccagcacgggagaggggattcctttcccaccgttccttccctttccgccccgccgctataaatagccagccccatccccagcttttttccccaatctcatctcctctctcctgttgttcggagcacacgcacaatccgatcgatccccaaatccccttcgtctctcctcgcgagcctcgtggatcccagcttcaaggtacggcgatcgatcatcccccctccttctctctaccttcttttctctagactacatcggatggcgatccatggttagggcctgctagtttcccttcctgttttgtcgatggctgcgaggcacaatagatctgatggcgttatgacggctaacttgtcatgttgttgcgatttatagtccctttaggagatcagtttaatttctcggatggttcgagatcggtggtccatggttagtaccctaagatccgcgctgttagggttcgtagatggaggcgacctgttctgattgttaacttgtcagtacctgggaaatcctgggatggttctagctcgtccgcagatgagatcgatttcatgatcctctgtatcttgtttcgttgcctaggttccgtctaatctatccgtggtatgatgtagatgttttgatcgtgctaactacgtcttgtaaagttaattgtcaggtcataatttttagcatgcctttttttttgtttggttttgtctaattgggctgtcgttctagatcagagtagaagactgttccaaactacctgctggatttattgaacttggatctgtatgtgtgtcacatatcttcataaattcatgattaagatggattgaaatatcttttatctttttggtatggatagttctatatgttggtgtggctttgttagatgtatacatgcttagatacatgaagcaacgtgctgctactgtttagtaattgctgttcatttgtctaataaacagataaggatatgtatttatgttgctgttggttttgctggtactttgttggatacaaatgcttcaatacagaaaacagcatgctgctacgatttaccatttatctaatcttatcatatgtctaatctaataaacaaacatgcttttaaattatcttcatatgcttggatgatggcatacacagcggctatgtgtggttttttaaatacccagcatcatgggcatgcatgacactgctttaatatgctttttatttgcttgagactgtttcttttgtttatactgaccctttagttcggtgactcttctgcaggtcgactttaacttagcctaggatccatggcccagtccaagcacggcctgaccaaggagatgaccatgaagtaccgcatggagggctgcgtggacggccacaagttcgtgatcaccggcgagggcatcggctaccccttcaagggcaagcaggccatcaacctgtgcgtggtggagggcggccccttgcccttcgccgaggacatcttgtccgccgccttcatgtacggcaaccgcgtgttcaccgagtacccccaggacatcgtcgactacttcaagaactcctgccccgccggctacacctgggaccgctccttcctgttcgaggacggcgccgtgtgcatctgcaacgccgacatcaccgtgagcgtggaggagaactgcatgtaccacgagtccaagttctacggcgtgaacttccccgccgacggccccgtgatgaagaagatgaccgacaactgggagccctcctgcgagaagatcatccccgtgcccaagcagggcatcttgaagggcgacgtgagcatgtacctgctgctgaaggacggtggccgcttgcgctgccagttcgacaccgtgtacaaggccaagtccgtgccccgcaagatgcccgactggcacttcatccagcacaagctgacccgcgaggaccgcagcgacgccaagaaccagaagtggcacctgaccgagcacgccatcgcctccggctccgccttgccctccggactcagatctcgatagggtaccaatggccagttaacagatccagctgctgctgttctagggttcacaagtctgcctatttgtcttccccaatggagctatggttgtctggtctggtccttggtcgtgtcccgtttcattgtgtactatttacctgtaatgtgtatccttaagtctggtttgatggtgtctgaaacgttttgctgtggtagagcagcatggaagaactataatgaataagtgatccctaatcattgtgtccaaattttgcttctgctatacccttttgtgctgtttcttatgttttgcttaaaaatttgatctgacaaacaaatttgtctaaattatgctcttgttctgactgtgtactgtacacatttgtattgctaccggtttggcacatagttttctctttgattgcagatcaaacccttctgattgcagattgcttggctatggctgatgtgctcactgttcttctttagcttgtatattgctgatggtggcttggctacggctgaaaaagttgctgctgcgccgacttggcaactgttgctccagtaatgctttgtcctctcttcctagccgccgacttggcacttggcagctgttgctcctgtaatgcgttgttatctcttatctcttgagatgtactatgattttgaggctgtttgacttgtgccagattgccagtgctgatgctatattatctcaggtttttatgctagtatatgttttactgtgtgctgcctgtgtcgagttacgtaatctattgaaccgctatgcgtgttgatgccctgttgttgcttgccagattgatgcccctgttgcttgcagcttgcaagctgtagtgaaatcctaaaattcgaaaccaaatctattctgaacttttgaagatctgtgatgtccggaagaaaagattcaaacagataaacgggactctccagaatctataaaataaatgatcgacaaacgctttgctttggtaggcttcctagttagttagcggaccgaagcttcggtccgggcctgcggccgcagatatcagaacctgcgtctggacgcacaagtcatagcattatcggctaaaatttcttaatttctaaattagtcatatcggctaagaaagtggggagcactatcatttcgtagaacaagaacaaggtatcatatatatatatatatataatatttaaactttgttaagtggaatcaaagtgctagtattaatggagtttcatgtgcattaaattttatgtcacatcagcaattttgttgacttggcaaggtcatttagggtgtgtttggaagacaggggctattaggagtattaaacatagtctaattacaaaactaattgcacaaccgctaagctgaatcgcgagatggatctattaagcttaattagtccatgatttgacaatgtggtgctacaataaccatttgctaatgatggattacttaggtttaatagattcgtctcgtgatttagcctatgggttctgctattaattttgtaattagctcatatttagttcttataattagtatccgaacatccaatgtgacatgctaaagtttaaccctggtatccaaatgaagtcttatgagagtttcatcactccggtggtatatgtacttaggctccgttttcttccaccgacttatttttagcacccgtcacattgaatgtttagatactaattagaagtattaaacgtagactatttacaaaatccattacataagacgaatctaaacggcgagacgaatctattaaacctaattagtccatgatttgacaatgtgttgctacagtaaacatttgctaatgatggattaattaggcttaatagattcgtctcgccgtttagcctccacttatgtaatgggttttctaaacaatctacgtttaatactcctaattagtatctaaatattcaatgtgacacgtgctaaaaataagtcagtggaaggaagagaacgtccccttagttttccatcttattaattgtacgatgaaactgtgcagccagatgattgacaatcgcaatacttcaactagtgggccatgcacatcagcgacgtgtaacgtcgtgagttgctgttcccgtagagaaatatcaactggtgggccacgcacatcagcgtcgtgtaacgtggacggaggagccccgtgacggcgtcgacatcgaacggccaccaaccacggaaccacccgtccccacctctcggaagctccgctccacggcgtcgacatctaacggctaccagcaggcgtacgggttggagtggactccttgcctctttgcgctggcggcttccggaaattgcgtggcggagacgaggcgggctcgtctcacacggcacggaagacgtcacgggttccttccccacctctcctcttccccaccgccataaatagccgaccccctcgcctttctccccaatctcatctcgtctcgtgttgttcggagcacaccacccgccccaaatcgttcttcccgcaagcctcggcgatccttcacccgcttcaaggtacggcgatcgtcttcctcctctagatcggcgtgatctgcaagtagttgatttggtagatggttaggatctgtgcactgaagaaatcatgttagatccgcgatgtttctgttcgtagatggctgggaggtggaatttttgtgtagatctgatatgttctcctgtttatcttgtcacgctcctgcgatttgtggggattttaggtcgttgatctgggaatcgtggggttgcttctaggctgttcgtagatgaggtcgttctcacggtttactggatcattgcctagtagatcagctcgggctttcgtctttgtatatggtgcccatacttgcatctatgatctggttccgtggtgttacctaggtttctgcgcctgattcgtccgatcgattttgttagcatgtggtaaacgtttggtcatggtctgatttagattagagtcgaataggatgatctcgatctagctcttgggattaatatgcatgtgtcaccaatctgttccgtggttaagatgatgaatctatgcttagttaatgggtgtagatatatatgctgctgttcctcaatgatgccgtagcttttacctgagcagcatggatcgtcctgttacttaggtagatgcacatgcttatagatcaagatatgtactgctactgttggaattctttagtatacctgatgatcatccatgctcttgttacttgttttggtatacttggatgatggcatgctgctgctttttgttgatttgagcccatccatatctgcatatgtcacatgattaagatgattacgctgtttctgtatgatgccatagcttttatgtgagcaacatgcatcctcctggttatatgcattaatagatggaagatatctattgctacaatttgatgattattttgtacatacgatgatcaagcatgctcttcatactttgttgatatacttggataatgaaatgctgctgcacgttcattctatagcactaatgatgtgatgaacacgcacgacctgtttgtggcatctgtttgaatgtgttgttgctgttcactagagactgttttattaacctactgctagatacttacccttctgtctgtttattcttttgcagccagaatagcggatccgcccatggtcgaacaggacggcctgcatgcaggatcaccagcggcctgggtcgaaagactcttcggctacgactgggcacaacagaccatcgggtgtagcgacgcagctgttttcaggctgtccgcacagggcagacccgttttgttcgtcaaaacagacctgtctggcgcgctcaacgaactgcaagacgaggccgcaagactgagctggcttgctaccacaggcgttccttgtgctgcagtcctcgacgtcgttactgaggctggaagagactggctgctcctgggtgaagtcccaggacaggaccttttgtccagccatctggcacctgccgaaaaggtcagcatcatggcagacgccatgagaaggctgcacacactcgaccctgcaacatgccccttcgatcaccaggcaaaacacaggatcgagcgcgcaagaacgcgcatggaggctggtttggtcgaccaagatgacctcgacgaggaacaccaaggactggctcctgctgaactcttcgccagactcaaggcgagaatgccagacggtgacgacctggtcgtcacacacggcgacgcttgtctcccaaacataatggtcgagaacggacgcttcagcggtttcatcgactgcggtagactcggagtcgctgacagataccaggacatcgccctggcaacacgcgacatcgcagaggaactcggaggcgaatgggctgacaggtttctcgtgctctacggtatcgctgctccagacagccagaggatcgcattctacaggctcctcgacgagttcttttagttcgaacggtacccggggatcctctagtgccgtgggtcgtttaagctgccgctgtacctgtgtcgtctggtgccttctggtgtacctgggaggttgtcgtctatcaagtatctgtggttggtgtcatgagtcagtgagtcccaatactgttcgtgtcctgtgtgcattatacccaaaactgttatgggcaaatcatgaataagcttgatgttcgaacttaaaagtctctgctcaatatggtattatggttgtttttgttcgtctcctaatatttgcctgggatcaaattttattggctggtgttcatttgacctccatgttcttgctaggctccattttttactctacagccataatatgtttgattgtttggtttgttctttgttgtacacctggttctgtcgagcttagttttcgacactggcttacagcttaacatgttgctattttattgggttctgattgctattttattgggttctgattgctagtttttgctgaatccaaaaaccatgttatttatttaagcgatccaggttattattatgatggtggctaagtttttttttttccaagggtaaattttctggattctccagtgtttctgtggccgaattcaatcactagagtcgacctgcatgattccgatgacttcgtaggttcctagctcaagccgctcgtgtccaagcgtcacttacgattagctaatgattacggcatctaggaccgactagctagctagctaagagctcggtaccgagctcgaattcattccgattaatcgtggcctcttgctcttcaggatgaagagctatgtttaaacgtgcaagcgctactagacaattcagtacattaaaaacgtccgcaatgtgttattaagttgtctaagcgtcaatttgtttacaccacaatatatcctgcca

SEQ ID NO: 5 - DNA, 21709 bp, synthetic construct
  source 1..21709: mol_type = other DNA
gtttacccgccaatatatcctgtcaaacactgcggccgcacttgaccgcggatggagccggagctgtggtgaggccatcgacgggaggtgggggagaacacagtctcagtgttctttgtgagtccgcaaggtttttagcttttctgtattaattaaggttgctgttggctgtagaatacggtcgtggaagagctgtatcggtagctactacgtaagctattatatactggaagtctggagctcgtcgatctccggtcgtcttcctccatttctcctcgtcttgctttgactgctgctaccatttgcttctgttttctgatgaagcatgccatgtcggccaccagtgtttgtgtggtttttgcagggaatggctttcaagtgctgtgattgaatggccctcgtcgtcctcggctgagctcacatggacgcgtcatgtgagtgagatatatgatcatatgatgagtggggttcgggtgagtgcgtacttgaagtaggatcccgctttcactcattcattcattggcctttaaaccgggaaattttcgcgaggagatggagggaagcaagcagggtgacgagtgcagagtgccgcgagcgctttgtcaaaaggcaccgccgtaggcaaaaaaatcaatggccctgactgactcgatggtagtactactgtagagactagagagggttgctccccatatcttcgtgtgacttttactccagcattgcatttccgtcattgagacgttaattaatagcagctttcgggacagatgactgtggccatgtttcgtcacggccgcttcgtgccagctgggggtactatagtactgtgattttgttagtaaaaactttcattaggccaccattgacgaccgggccttcgcttttgctgcgctaattaaccatttcccggcgaccgaagggaacatgaacatgccccgacacatgagggcatgaggactagtgttctccctgtcgttcgttgacttgactagtgatagtttaaacgctcttcaactggaagagcggttactaccggttcactagctagctgctaatcgagctagttaccctatgaggtgacatgaagcgctcacggttactatgacggttagcttcacgactgttggtggcagtagcgtacgacttagctatagttccggacttacccttaagataacttcgtatagcatacattatacgaagttatgggcccacgcgtgaagagcggttaccagagctggtcacctttgtccaccaagatggaactgtcttcggccagaatggccatctggattcagcaggcctagaaggccatttatcgctatcaactttgtatagaaaagttgggccgaattcgagctcggtacggccagaatggcccggaccgaagcttgcggccgcacactgatagtttaaactgaaggcgggaaacgacaatctgatcatgagcggagaattaagggagtcacgttatgacccccgccgatgacgcgggacaagccgttttacgtttggaactgacagaaccgcaacgttgaaggagccactcagccgcgggtttctggagtttaatgagctaagcacatacgtcagaaaccattattgcgcgttcaaaagtcgcctaaggtcactatcagctagcaaatatttcttgtcaaaaatgctccactgacgttccataaattcccctcggtatccaattagagtctcatattcactctcccgggggatctcgactctagaggatcgctcaggaaggccgctgagatagaggcatggcggccaatgcgggcggcggtggagcgggaggaggcagcggcagcggcagcgtggctgcgccggcggtgtgccgccccagcggctcgcggtggacgccgacgccggagcagatcaggatgctgaaggagctctactacggctgcggcatccggtcgcccagctcggagcagatccagcgcatcaccgccatgctgcggcagcacggcaagatcgagggcaagaacgtcttctactggttccagaaccacaaggcccgcgagcgccagaagcgccgcctcaccagcctcgacgtcaacgtgcccgccgccggcgcggccgacgccaccaccagccaactcggcgtcctctcgctgtcgtcgccgccgccttcaggcgcggcgcctccctcgcccaccctcggcttctacgccgccggcaatggcggcggatcggctgtgctgctggacacgagttccgactggggcagcagcggcgctgccatggccaccgagacatgcttcctgcaggactacatgggcgtgacggacacgggcagctcgtcgcagtggccacgcttctcgtcgtcggacacgataatggcggcggccgcggcgcgggcggcgacgacgcgggcgcccgagacgctccctctcttcccgacctgcggcgacgacggcggcagcggtagcagcagctacttgccgttctggggtgccgcgtccacaactgccggcgccacttcttccgttgcgatccagcagcaacaccagctgcaggagcagtacagcttttacagcaacagcaacagcacccagctggccggcaccggcaaccaagacgtatcggcaacagcagcagcagccgccgccctggagctgagcctcagctcatggtgctccccttaccctgctgcagggagtatgtgagagcaacgcgagctgccactgctcttcactgatgtctctggaatggaaggaggaggaagtgagcatagcgttggtgcgttgctgtcaagggcgaattcacatggttaaccgacaaagcagcattagtccgttgatcggtggaagaccactcgtcagtgttgagttgaatgtttgatcaataaaatacggcaatgctgtaagggttgttttttatgccattgataatacactgtactgttcagttgttgaactctatttcttagccatgccaagtgcttttcttattttgaataacattacagcaaaaagttgaaagacaaaaaaaaaaacccccgaacagagtgctttgggtcccaagcttctttagactgtgttcggcgttccccctaaatttctccccctatatctcactcacttgtcacatcagcgttctctttccccctatatctccacgctctacagcagttccacctatatcaaacctctataccccaccacaacaatattatatactttcatcttcaactaactcatgtaccttccaatttttttctactaataattatttacgtgcacagaaacttagcaaggagagagagagcgggaatgcggccgccaccgcggtggagctcgaattccggtccgggcctagaaggccagcttcaagtttgtacaaaaaagcaggctccggccagaatctcactgactagctaaacagcggccgcatcgagcagctggcttgtggggaccagacaaaaaaggaatggtgcagaattgttaggcgcacctaccaaaagcatctttgcctttattgcaaagataaagcagattcctctagtacaagtggggaacaaaataacgtggaaaagagctgtcctgacagcccactcactaatgcgtatgacgaacgcagtgacgaccacaaaactcgagcaacgagatcatgagccaatcaaagaggagtgatgtagacctaaagcaataatggagccatgacgtaagggcttacgcccatacgaaataattaaaggctgatgtgacctgtcggtctctcagaacctttactttttatgtttggcgtgtatttttaaatttccacggcaatgacgatgtgaccgtcgacccactaaaacattgctttgtcaaaagctaaaaaagatgatgcccgacagccacttgtgtgaagcatgagaagccggtccctccactaagaaaattagtgaagcatcttccagtggtccctccactcacagctcaatcagtgagcaacaggacgaaggaaatgacgtaagccatgacgtctaatcccagggcccggtgaccaatcgaattagcttggcgcgtggaccgaagcttgcatgcctgcagtgcagcgtgacccggtcgtgcccctctctagagataatgagcattgcatgtctaagttataaaaaattaccacatattttttttgtcacacttgtttgaagtgcagtttatctatctttatacatatatttaaactttactctacgaataatataatctatagtactacaataatatcagtgttttagagaatcatataaatgaacagttagacatggtctaaaggacaattgagtattttgacaacaggactctacagttttatctttttagtgtgcatgtgttctcctttttttttgcaaatagcttcacctatataatacttcatccattttattagtacatccatttagggtttagggttaatggtttttatagactaatttttttagtacatctattttattctattttagcctctaaattaagaaaactaaaactctattttagtttttttatttaataatttagatataaaatagaataaaataaagtgactaaaaattaaacaaataccctttaagaaattaaaaaaactaaggaaacatttttcttgtttcgagtagataatgccagcctgttaaacgccgtcgacgagtctaacggacaccaaccagcgaaccagcagcgtcgcgtcgggccaagcgaagcagacggcacggcatctctgtcgctgcctctggacccctctcgagagttccgctccaccgttggacttgctccgctgtcggcatccagaaattgcgtggcggagcggcagacgtgagccggcacggcaggcggcctcctcctcctctcacggcaccggcagctacgggggattcctttcccaccgctccttcgctttcccttcctcgcccgccgtaataaatagacaccccctccacaccctctttccccaacctcgtgttgttcggagcgcacacacacacaaccagatctcccccaaatccacccgtcggcacctccgcttcaaggtacgccgctcgtcctcccccccccccctctctaccttctctagatcggcgttccggtccatgcatggttagggcccggtagttctacttctgttcatgtttgtgttagatccgtgtttgtgttagatccgtgctgctagcgttcgtacacggatgcgacctgtacgtcagacacgttctgattgctaacttgccagtgtttctctttggggaatcctgggatggctctagccgttccgcagacgggatcgatttcatgattttttttgtttcgttgcatagggtttggtttgcccttttcctttatttcaatatatgccgtgcacttgtttgtcgggtcatcttttcatgcttttttttgtcttggttgtgatgatgtggtctggttgggcggtcgttctagatcggagtagaattctgtttcaaactacctggtggatttattaattttggatctgtatgtgtgtgccatacatattcatagttacgaattgaagatgatggatggaaatatcgatctaggataggtatacatgttgatgcgggttttactgatgcatatacagagatgctttttgttcgcttggttgtgatgatgtggtgtggttgggcggtcgttcattcgttctagatcggagtagaatactgtttcaaactacctggtgtatttattaattttggaactgtatgtgtgtgtcatacatcttcatagttacgagtttaagatggatggaaatatcgatctaggataggtatacatgttgatgtgggttttactgatgcatatacatgatggcatatgcagcatctattcatatgctctaaccttgagtacctatctattataataaacaagtatgttttataattattttgatcttgatatacttggatgatggcatatgcagcagctatatgtggatttttttagcactgccttcatacgctatttatttgcttggtactgtttcttttgtcgatgctcaccctgttgtttggtgttacttctgcaggtcgactttaacttagcctaggatccatggacacgttcgggcagcgcacgtcgatttaccgtggcgtgacaaggcatagatggactgggagatatgaggcacatctttgggataacagttgcagaagggaagggcaaactcgtaagggtcgtcaagtctatttaggtggctatgataaagaggagaaagctgctagggcttatgatcttgctgctctgaagtactggggtgccacaacaacaacaaattttccagtgagtaactacgaaaaggagctcgaggacatgaagcacatgacaaggcaggagtttgtagcgtctctgagaaggaagagcagtggtttctccagaggtgcatccatttacaggggagtgactaggcatcaccaacatggaagatggcaagcacggattggacgagttgcagggaacaaggatctttacttgggcaccttcagcacccaggaggaggcagcggaggcgtacgacatcgcggcgatcaagttccgcggcctcaacgccgtcaccaacttcgacatgagccgctacgacgtgaagagcatcctggacagcagcgccctccccatcggcagcgccgccaagcgcctcaaggaggccgaggccgcagcgtccgcgcagcaccaccacgccggcgtggtgagctacgacgtcggccgcatcgcctcgcagctcggcgacggcggagccctggcggcggcgtacggcgcgcactaccacggcgccgcctggccgaccatcgcgttccagccgggcgccgccagcacaggcctgtaccacccgtacgcgcagcagccaatgcgcggcggcgggtggtgcaagcaggagcaggaccacgcggtgatcgcggccgcgcacagcctgcaggacctccaccacctgaacctgggcgcggccggcgcgcacgactttttctcggcagggcagcaggccgccgccgctgcgatgcacggcctgggtagcatcgacagtgcgtcgctcgagcacagcaccggctccaactccgtcgtctacaacggcggggtcggcgacagcaacggcgccagcgccgtcggcggcagtggcggtggctacatgatgccgatgagcgctgccggagcaaccactacatcggcaatggtgagccacgagcaggtgcatgcacgggcctacgacgaagccaagcaggctgctcagatggggtacgagagctacctggtgaacgcggagaacaatggtggcggataaggtacctgacatcttatagtctgcaacctctcgtgtctgaattcctatctttatcaagtgttattgcttccacgactataggacagctttcgtcgaaagcttttgctcatgtgatctcgaaggattcatctagtctgatttttcgtgacttgtatcggttttattggattcatccaacatatatcaataaaaaatgagttgtgtttcctttcttcctagttcagttaaaattatttccctcctgcgcttgtgctgtaattgtctgtgtacctgttgtttgtgactgtgttagttcccttggatatgatttcgtatttgatatgtacatggagatagcttagcttcattattggagtatgaagttagtatgacatagtcactctcctggaaaattgacactgcaaaccatatttttattctgaaccacaaatcctagtcagtccgctggcatatgccgtccgtttgctgaatccagaacgtgggtttggagatgtacggctgagatgcctctatgcgaaggggatttcgtggtgaaacgagatgggagtagagcaacgcccgtggaagatgcttcaaacttccacacttttgagcaacgatcggcagtagtaaggtagacgatttcaagatcaaagcatatgaagataaacaacatcaacaacaaaatttgttggggttctatagagagaaacagagctacatacatacactgttttgtatctaccatctgagatgatgaaaagatgaaaaactaaagaatgccccggcgccaacgccaggacacgccgcgcgcgcgtcacccgagccatctcttgacccagccggcgctgtatatttacacacgttgcagcatcgatcaccacctgttcgatcgcgtcgccgtcaccggcgcgccgcgacttattgaactagtctagggcgcggctaacaacctagcttagattgccttgtctaaacccttaggctaacgcgccactctagaaggccgatctcccccgaacgcgccagatccgatatcgatgggccctggccgaagcttggtcacccggtccgggcctagaaggccgatctcccgggcacccagctttcttgtacaaagtggccgttaacggatcggccagaatggcccggaccgggttaccccgcggttcaaagccaatgactgttgttaggtccagtttctaaggacgaatcatccaatcactggttctttctgaacaaaacaaagagctatagagttacgttactgtagccgagacagagcctgcaatctggttatgccacatactaggttctttcttaaagttgactcactctatcctaagttctacttacaaggagctacaacaaattggtcataaccggagagcgttcaaggaggtaatatcccatcttactctgtagcaaggctacaaaaggagagctaaagaactaggctacaaaaagagagctaaagaactaactatctagcaagactacagagctatagtgtagagatttcataaccggtgagcgttcaaggatactttgaagagaagaggtaatatctcaactagcaagactacaaaaaaatggagatataaaactaactgtctaacaagactacagagctatagtagagatagatacgttcgacacttaagcatgagaattcgagctcggtaccctggttcacaaactcaatacaacacacagtggagtagggtattacgctccggcggcccgaaccactctaaatccttgtgtcctcgtgtgctcttccaccattaatgactgtaattgcagggacacgaagagttgtagcgcttttgccaacaagatccgctatatgctagtagagtggaacctgcacagcaacaagcatccaataatctgagaataagaattatgtgtggtgatggttctcatctctgcaactcgccattttcgcgagagaaccaaatccaagttggtgaagatcatgatttgggctcatgggctggcatagtagctattacctttgcaattgtggttcgaatctatccgatattctccttttcagggagagctaatgcttatgcttattgggtattttggtttgacactgcttcacgcccaaaaaaaggcaactatgtctgagttggatatggcccaaaaaaaggcagctatgtctgagttggatatggaagtcttctttcgtttagggtgaagtaagaccaagctcatgagcttattatcttaggtcggaacaaattagttgataggcatggcacatttatcaaattataatgattttaacagaaaagcaacacctctttttcagcagcaccagctttgcaagctgcaattgacactccaagcatagtatttgctccaaactcagcctgcatttcgcacaatatcatatctatttccatttggataaaatatattttccagaaatatgggaacagaatcaagatacagaaaaaagttgtggtagtagtggtaagtggaaacacaagtacagtgaaaagatagcattatttctgaacagtcaaattaaccgaaataagtagtatcacatactgcccctaaattgactacacccaatgtaaagaattgcttgagcatattgagccatcagttgtttgtttgtgtaacggatttgacaatgcagagttcaggagcaaaaaaccgcaaaggagagaaagagggaaaggatctcctagtatcccaccttgtggcgcgccctgtcaagtgcatgatggcctggtcgatctgcgtctgctgctgcggttccatcccaacgagtgcctccgacaccttgtcgttgatcacccgcaccgcgtaggcgacccccctggcgaggaacttccgcctctcggaggccccggccgcgtcggcggcggcgccctcgagcgcgcccacgctagccgtagatgctcggtgcacggccttgttggtgtgcaactcgacctcaacggccggtgcgctacgcccgtcaaggatctggcgcgcccgcaccctcgtgatcacggtgggcgcctcccgcctcatgtggccgacgatgaaaagcgccgggttaggggccttggcgcgcaccgccgtattcagggcctcctcgctcttgcgcgagagcaggtgcttccccaggtactcctgcactgacaaggctgccacagcggtggaatttgtcctcacgacttcgccacgtcgtcctcacctccctggcttcccacgactccgccgtatcgaggtgctcggtgggtcgtcttaatccgaagtccgaactaggaagacgagacagagaggtctgaggaatgggcctcgtttgatgttgagctgaattatttttccagcataagcccaggtcttggtccatgaacaaaattactagaaacccagcccagtactacgatctaaaagagggactgccactggatagctctctctagcattctccacgctccaatacagcggcgtcgtgtctatccgggtctatccgcgaacacgtgagaactctccagaaactgctttctcctccacttcatctctctcgctttccctctataaaaagaccccttctaggaattgagggagacagcaagcaccaagcagcgatccgaagctcaatcaattcactcaaacctcttccccaaatcttcgattagatcttcgttgacaagaagactagaaccgaacctgacatgtccaacctgctcacggttcaccagaaccttccggctcttccagtggacgcgacgtccgatgaagtcaggaagaacctcatggacatgttccgcgacaggcaagcgttcagcgagcacacctggaagatgctgctctccgtctgccgctcctgggctgcatggtgcaagctgaacaacaggaagtggttccccgctgagcccgaggacgtgagggattaccttctgtacctgcaagcgcgaggtttgtttctgcttctacctttgatatatatataataattatcattaattagtagtaatataatatttcaaatatttttttcaaaataaaagaatgtagtatatagcaattgcttttctgtagtttataagtgtgtatattttaatttataacttttctaatatatgaccaaaacatggtgatgcctaggtctggcagtgaagaccatccagcaacaccttggacaactgaacatgcttcacaggcgctccggcctcccgcgccccagcgactcgaacgccgtgagcctcgtcatgcgccgcatcaggaaggaaaacgtcgatgccggcgaaagggcaaagcaggccctcgcgttcgagaggaccgatttcgaccaggtccgcagcctgatggagaacagcgacaggtgccaggacattaggaacctggcgttcctcggaattgcatacaacacgctcctcaggatcgcggaaattgcccgcattcgcgtgaaggacattagccgcaccgacggcggcaggatgcttatccacattggcaggaccaagacgctcgtttccaccgcaggcgtcgaaaaggccctcagcctcggagtgaccaagctcgtcgaacgctggatctccgtgtccggcgtcgcggacgacccaaacaactacctcttctgccgcgtccgcaagaacggggtggctgcccctagcgccaccagccaactcagcacgagggccttggaaggtattttcgaggccacccaccgcctgatctacggcgcgaaggatgacagcggtcaacgctacctcgcatggtccgggcactccgcccgcgttggagctgctagggacatggcccgcgccggtgtttccatccccgaaatcatgcaggcgggtggatggacgaacgtgaacattgtcatgaactacattcgcaaccttgacagcgagacgggcgcaatggttcgcctcctggaagatggtgactgaggtacccaacctagacttgtccatcttctggattggccaacttaattaatgtatgaaataaaaggatgcacacatagtgacatgctaatcactataatgtgggcatcaaagttgtgtgttatgtgtaattactagttatctgaataaaagagaaagagatcatccatatttcttatcctaaatgaatgtcacgtgtctttataattctttgatgaaccagatgcatttcattaaccaaatccatatacatataaatattaatcatatataattaatatcaattgggttagcaaaacaaatctagtctaggtgtgttttgcgatccgatatcgaattggccacggtaccagctgctgctgttctagggttcacaagtctgcctatttgtcttccccaatggagctatggttgtctggtctggtccttggtcgtgtcccgtttcattgtgtactatttacctgtaatgtgtatccttaagtctggtttgatggtgtctgaaacgttttgctgtggtagagcagcatggaagaactataatgaataagtgatccctaatcattgtgtccaaattttgcttctgctatacccttttgtgctgtttcttatgttttgcttaaaaatttgatctgacaaacaaatttgtctaaattatgctcttgttctgactgtgtactgtacacatttgtattgctaccggtttggcacatagttttctctttgattgcagatcaaacccttctgattgcagattgcttggctatggctgatgtgctcactgttcttctttagcttgtatattgctgatggtggcttggctacggctgaaaaagttgctgctgcgccgacttggcaactgttgctccagtaatgctttgtcctctcttcctagccgccgacttggcacttggcagctgttgctcctgtaatgcgttgttatctcttatctcttgagatgtactatgattttgaggctgtttgacttgtgccagattgccagtgctgatgctatattatctcaggtttttatgctagtatatgttttactgtgtgctgcctgtgtcgagttacgtaatctattgaaccgctatgcgtgttgatgccctgttgttgcttgccagattgatgcccctgttgcttgcagcttgcaagctgtagtgaaatcctaaaattccaaaccaaatctattctgaacttttgaagatctgtgatgtccggaagaaaagattcaaacagataaacgggactctccagaatctataaaataaatgatcgacaaacgctttgctttggtaggcttcaagcttggtcacccggtccgggcctagaaggccagcttcggccgccccgggcaactttattatacaaagttgatagataaatcagatatctggttcctaaggacccggcggaccgattaaactgattcggtccgacgcgttacctaataacttcgtatagcatacattatacgaagttattagctaactaactagtaagcgtacacctgagcggttaccgaattcctgcccttaaggccaattgttcaagattcattcaacaattgaaacatctcccatgattaaatcagtataaggttgctatggtcttgcttgacaaagtttttttttgagggaatttcaactaaatttttgagtgaaactatcaaatactgattttaaaaaatttttataaaaggaagcgcagagataaaaggccatctatgctacaaaagtacccaaaaatgtaatcctaaagtatgaattgcattttttttttgtttggacgaaaggaaaggagtattaccacaagaatgatatcatcttcatatttagatcttttttgggtaaagcttgagattctctaaatatagagaaatcagaagaaaaaaaaaccgtgttttggtggttttgatttctagcctccacaataactttgacggcgtcgacaagtctaacggacaccaagcagcgaaccaccagcgccgagccaagcgaagcagacggccgagacgttgacaccttcggcgcggcatctctcgagagttccgctccggcgctccacctccaccgctggcggtttcttattccgttccgttccgcctcctgctctgctcctctccacaccacacggcacgaaaccgttacggcaccggcagcacccagcacgggagaggggattcctttcccaccgttccttccctttccgccccgccgctataaatagccagccccatccccagcttttttccccaatctcatctcctctctcctgttgttcggagcacacgcacaatccgatcgatccccaaatccccttcgtctctcctcgcgagcctcgtggatcccagcttcaaggtacggcgatcgatcatcccccctccttctctctaccttcttttctctagactacatcggatggcgatccatggttagggcctgctagtttcccttcctgttttgtcgatggctgcgaggcacaatagatctgatggcgttatgacggctaacttgtcatgttgttgcgatttatagtccctttaggagatcagtttaatttctcggatggttcgagatcggtggtccatggttagtaccctaagatccgcgctgttagggttcgtagatggaggcgacctgttctgattgttaacttgtcagtacctgggaaatcctgggatggttctagctcgtccgcagatgagatcgatttcatgatcctctgtatcttgtttcgttgcctaggttccgtctaatctatccgtggtatgatgtagatgttttgatcgtgctaactacgtcttgtaaagttaattgtcaggtcataatttttagcatgcctttttttttgtttggttttgtctaattgggctgtcgttctagatcagagtagaagactgttccaaactacctgctggatttattgaacttggatctgtatgtgtgtcacatatcttcataaattcatgattaagatggattgaaatatcttttatctttttggtatggatagttctatatgttggtgtggctttgttagatgtatacatgcttagatacatgaagcaacgtgctgctactgtttagtaattgctgttcatttgtctaataaacagataaggatatgtatttatgttgctgttggttttgctggtactttgttggatacaaatgcttcaatacagaaaacagcatgctgctacgatttaccatttatctaatcttatcatatgtctaatctaataaacaaacatgcttttaaattatcttcatatgcttggatgatggcatacacagcggctatgtgtggttttttaaatacccagcatcatgggcatgcatgacactgctttaatatgctttttatttgcttgagactgtttcttttgtttatactgaccctttagttcggtgactcttctgcaggtcgactttaacttagcctaggatccatggcccagtccaagcacggcctgaccaaggagatgaccatgaagtaccgcatggagggctgcgtggacggccacaagttcgtgatcaccggcgagggcatcggctaccccttcaagggcaagcaggccatcaacctgtgcgtggtggagggcggccccttgcccttcgccgaggacatcttgtccgccgccttcatgtacggcaaccgcgtgttcaccgagtacccccaggacatcgtcgactacttcaagaactcctgccccgccggctacacctgggaccgctccttcctgttcgaggacggcgccgtgtgcatctgcaacgccgacatcaccgtgagcgtggaggagaactgcatgtaccacgagtccaagttctacggcgtgaacttccccgccgacggccccgtgatgaagaagatgaccgacaactgggagccctcctgcgagaagatcatccccgtgcccaagcagggcatcttgaagggcgacgtgagcatgtacctgctgctgaaggacggtggccgcttgcgctgccagttcgacaccgtgtacaaggccaagtccgtgccccgcaagatgcccgactggcacttcatccagcacaagctgacccgcgaggaccgcagcgacgccaagaaccagaagtggcacctgaccgagcacgccatcgcctccggctccgccttgccctccggactcagatctcgatagggtaccaatggccagttaacagatccagctgctgctgttctagggttcacaagtctgcctatttgtcttccccaatggagctatggttgtctggtctggtccttggtcgtgtcccgtttcattgtgtactatttacctgtaatgtgtatccttaagtctggtttgatggtgtctgaaacgttttgctgtggtagagcagcatggaagaactataatgaataagtgatccctaatcattgtgtccaaattttgcttctgctatacccttttgtgctgtttcttatgttttgcttaaaaatttgatctgacaaacaaatttgtctaaattatgctcttgttctgactgtgtactgtacacatttgtattgctaccggtttggcacatagttttctctttgattgcagatcaaacccttctgattgcagattgcttggctatggctgatgtgctcactgttcttctttagcttgtatattgctgatggtggcttggctacggctgaaaaagttgctgctgcgccgacttggcaactgttgctccagtaatgctttgtcctctcttcctagccgccgacttggcacttggcagctgttgctcctgtaatgcgttgttatctcttatctcttgagatgtactatgattttgaggctgtttgacttgtgccagattgccagtgctgatgctatattatctcaggtttttatgctagtatatgttttactgtgtgctgcctgtgtcgagttacgtaatctattgaaccgctatgcgtgttgatgccctgttgttgcttgccagattgatgcccctgttgcttgcagcttgcaagctgtagtgaaatcctaaaattcgaaaccaaatctattctgaacttttgaagatctgtgatgtccggaagaaaagattcaaacagataaacgggactctccagaatctataaaataaatgatcgacaaacgctttgctttggtaggcttcctagttagttagcggaccgaagcttcggtccgggcctgcggccgcagatatcagaacctgcgtctggacgcacaagtcatagcattatcggctaaaatttcttaatttctaaattagtcatatcggctaagaaagtggggagcactatcatttcgtagaacaagaacaaggtatcatatatatatatatatataatatttaaactttgttaagtggaatcaaagtgctagtattaatggagtttcatgtgcattaaattttatgtcacatcagcaattttgttgacttggcaaggtcatttagggtgtgtttggaagacaggggctattaggagtattaaacatagtctaattacaaaactaattgcacaaccgctaagctgaatcgcgagatggatctattaagcttaattagtccatgatttgacaatgtggtgctacaataaccatttgctaatgatggattacttaggtttaatagattcgtctcgtgatttagcctatgggttctgctattaattttgtaattagctcatatttagttcttataattagtatccgaacatccaatgtgacatgctaaagtttaaccctggtatccaaatgaagtcttatgagagtttcatcactccggtggtatatgtacttaggctccgttttcttccaccgacttatttttagcacccgtcacattgaatgtttagatactaattagaagtattaaacgtagactatttacaaaatccattacataagacgaatctaaacggcgagacgaatctattaaacctaattagtccatgatttgacaatgtgttgctacagtaaacatttgctaatgatggattaattaggcttaatagattcgtctcgccgtttagcctccacttatgtaatgggttttctaaacaatctacgtttaatactcctaattagtatctaaatattcaatgtgacacgtgctaaaaataagtcagtggaaggaagagaacgtccccttagttttccatcttattaattgtacgatgaaactgtgcagccagatgattgacaatcgcaatacttcaactagtgggccatgcacatcagcgacgtgtaacgtcgtgagttgctgttcccgtagagaaatatcaactggtgggccacgcacatcagcgtcgtgtaacgtggacggaggagccccgtgacggcgtcgacatcgaacggccaccaaccacggaaccacccgtccccacctctcggaagctccgctccacggcgtcgacatctaacggctaccagcaggcgtacgggttggagtggactccttgcctctttgcgctggcggcttccggaaattgcgtggcggagacgaggcgggctcgtctcacacggcacggaagacgtcacgggttccttccccacctctcctcttccccaccgccataaatagccgaccccctcgcctttctccccaatctcatctcgtctcgtgttgttcggagcacaccacccgccccaaatcgttcttcccgcaagcctcggcgatccttcacccgcttcaaggtacggcgatcgtcttcctcctctagatcggcgtgatctgcaagtagttgatttggtagatggttaggatctgtgcactgaagaaatcatgttagatccgcgatgtttctgttcgtagatggctgggaggtggaatttttgtgtagatctgatatgttctcctgtttatcttgtcacgctcctgcgatttgtggggattttaggtcgttgatctgggaatcgtggggttgcttctaggctgttcgtagatgaggtcgttctcacggtttactggatcattgcctagtagatcagctcgggctttcgtctttgtatatggtgcccatacttgcatctatgatctggttccgtggtgttacctaggtttctgcgcctgattcgtccgatcgattttgttagcatgtggtaaacgtttggtcatggtctgatttagattagagtcgaataggatgatctcgatctagctcttgggattaatatgcatgtgtcaccaatctgttccgtggttaagatgatgaatctatgcttagttaatgggtgtagatatatatgctgctgttcctcaatgatgccgtagcttttacctgagcagcatggatcgtcctgttacttaggtagatgcacatgcttatagatcaagatatgtactgctactgttggaattctttagtatacctgatgatcatccatgctcttgttacttgttttggtatacttggatgatggcatgctgctgctttttgttgatttgagcccatccatatctgcatatgtcacatgattaagatgattacgctgtttctgtatgatgccatagcttttatgtgagcaacatgcatcctcctggttatatgcattaatagatggaagatatctattgctacaatttgatgattattttgtacatacgatgatcaagcatgctcttcatactttgttgatatacttggataatgaaatgctgctgcacgttcattctatagcactaatgatgtgatgaacacgcacgacctgtttgtggcatctgtttgaatgtgttgttgctgttcactagagactgttttattaacctactgctagatacttacccttctgtctgtttattcttttgcagccagaatagcggatccgcccatggtcgaacaggacggcctgcatgcaggatcaccagcggcctgggtcgaaagactcttcggctacgactgggcacaacagaccatcgggtgtagcgacgcagctgttttcaggctgtccgcacagggcagacccgttttgttcgtcaaaacagacctgtctggcgcgctcaacgaactgcaagacgaggccgcaagactgagctggcttgctaccacaggcgttccttgtgctgcagtcctcgacgtcgttactgaggctggaagagactggctgctcctgggtgaagtcccaggacaggaccttttgtccagccatctggcacctgccgaaaaggtcagcatcatggcagacgccatgagaaggctgcacacactcgaccctgcaacatgccccttcgatcaccaggcaaaacacaggatcgagcgcgcaagaacgcgcatggaggctggtttggtcgaccaagatgacctcgacgaggaacaccaaggactggctcctgctgaactcttcgccagactcaaggcgagaatgccagacggtgacgacctggtcgtcacacacggcgacgcttgtctcccaaacataatggtcgagaacggacgcttcagcggtttcatcgactgcggtagactcggagtcgctgacagataccaggacatcgccctggcaacacgcgacatcgcagaggaactcggaggcgaatgggctgacaggtttctcgtgctctacggtatcgctgctccagacagccagaggatcgcattctacaggctcctcgacgagttcttttagttcgaacggtacccggggatcctctagtgccgtgggtcgtttaagctgccgctgtacctgtgtcgtctggtgccttctggtgtacctgggaggttgtcgtctatcaagtatctgtggttggtgtcatgagtcagtgagtcccaatactgttcgtgtcctgtgtgcattatacccaaaactgttatgggcaaatcatgaataagcttgatgttcgaacttaaaagtctctgctcaatatggtattatggttgtttttgttcgtctcctaatatttgcctgggatcaaattttattggctggtgttcatttgacctccatgttcttgctaggctccattttttactctacagccataatatgtttgattgtttggtttgttctttgttgtacacctggttctgtcgagcttagttttcgacactggcttacagcttaacatgttgctattttattgggttctgattgctattttattgggttctgattgctagtttttgctgaatccaaaaaccatgttatttatttaagcgatccaggttattattatgatggtggctaagtttttttttttccaagggtaaattttctggattctccagtgtttctgtggccgaattcaatcactagagtcgacctgcatgattccgatgacttcgtaggttcctagctcaagccgctcgtgtccaagcgtcacttacgattagctaatgattacggcatctaggaccgactagctagctagctaagagctcggtaccgagctcgaattcattccgattaatcgtggcctcttgctcttcaggatgaagagctatgtttaaacgtgcaagcgctactagacaattcagtacattaaaaacgtccgcaatgtgttattaagttgtctaagcgtcaatttgtttacaccacaatatatcctgcca

SEQ ID NO: 6 - DNA, 21874 bp, synthetic construct
  source 1..21874: mol_type = other DNA
gtttacccgccaatatatcctgtcaaacactgcggccgcacttgaccgcggatggagccggagctgtggtgaggccatcgacgggaggtgggggagaacacagtctcagtgttctttgtgagtccgcaaggtttttagcttttctgtattaattaaggttgctgttggctgtagaatacggtcgtggaagagctgtatcggtagctactacgtaagctattatatactggaagtctggagctcgtcgatctccggtcgtcttcctccatttctcctcgtcttgctttgactgctgctaccatttgcttctgttttctgatgaagcatgccatgtcggccaccagtgtttgtgtggtttttgcagggaatggctttcaagtgctgtgattgaatggccctcgtcgtcctcggctgagctcacatggacgcgtcatgtgagtgagatatatgatcatatgatgagtggggttcgggtgagtgcgtacttgaagtaggatcccgctttcactcattcattcattggcctttaaaccgggaaattttcgcgaggagatggagggaagcaagcagggtgacgagtgcagagtgccgcgagcgctttgtcaaaaggcaccgccgtaggcaaaaaaatcaatggccctgactgactcgatggtagtactactgtagagactagagagggttgctccccatatcttcgtgtgacttttactccagcattgcatttccgtcattgagacgttaattaatagcagctttcgggacagatgactgtggccatgtttcgtcacggccgcttcgtgccagctgggggtactatagtactgtgattttgttagtaaaaactttcattaggccaccattgacgaccgggccttcgcttttgctgcgctaattaaccatttcccggcgaccgaagggaacatgaacatgccccgacacatgagggcatgaggactagtgttctccctgtcgttcgttgacttgactagtgatagtttaaacgctcttcaactggaagagcggttactaccggttcactagctagctgctaatcgagctagttaccctatgaggtgacatgaagcgctcacggttactatgacggttagcttcacgactgttggtggcagtagcgtacgacttagctatagttccggacttacccttaagataacttcgtatagcatacattatacgaagttatgggcccacgcgtgaagagcggttaccagagctggtcacctttgtccaccaagatggaactgtcttcggccagaatggccatctggattcagcaggcctagaaggccatttatcgctatcaactttgtatagaaaagttgggccgaattcgagctcggtacggccagaatggcccggaccgaagcttgcggccgcacactgatagtttaaactgaaggcgggaaacgacaatctgatcatgagcggagaattaagggagtcacgttatgacccccgccgatgacgcgggacaagccgttttacgtttggaactgacagaaccgcaacgttgaaggagccactcagccgcgggtttctggagtttaatgagctaagcacatacgtcagaaaccattattgcgcgttcaaaagtcgcctaaggtcactatcagctagcaaatatttcttgtcaaaaatgctccactgacgttccataaattcccctcggtatccaattagagtctcatattcactctcccgggggatctcgactctagaggatcgctcaggaaggccgctgagatagaggcatggcggccaatgcgggcggcggtggagcgggaggaggcagcggcagcggcagcgtggctgcgccggcggtgtgccgccccagcggctcgcggtggacgccgacgccggagcagatcaggatgctgaaggagctctactacggctgcggcatccggtcgcccagctcggagcagatccagcgcatcaccgccatgctgcggcagcacggcaagatcgagggcaagaacgtcttctactggttccagaaccacaaggcccgcgagcgccagaagcgccgcctcaccagcctcgacgtcaacgtgcccgccgccggcgcggccgacgccaccaccagccaactcggcgtcctctcgctgtcgtcgccgccgccttcaggcgcggcgcctccctcgcccaccctcggcttctacgccgccggcaatggcggcggatcggctgtgctgctggacacgagttccgactggggcagcagcggcgctgccatggccaccgagacatgcttcctgcaggactacatgggcgtgacggacacgggcagctcgtcgcagtggccacgcttctcgtcgtcggacacgataatggcggcggccgcggcgcgggcggcgacgacgcgggcgcccgagacgctccctctcttcccgacctgcggcgacgacggcggcagcggtagcagcagctacttgccgttctggggtgccgcgtccacaactgccggcgccacttcttccgttgcgatccagcagcaacaccagctgcaggagcagtacagcttttacagcaacagcaacagcacccagctggccggcaccggcaaccaagacgtatcggcaacagcagcagcagccgccgccctggagctgagcctcagctcatggtgctccccttaccctgctgcagggagtatgtgagagcaacgcgagctgccactgctcttcactgatgtctctggaatggaaggaggaggaagtgagcatagcgttggtgcgttgctgtcaagggcgaattcacatggttaaccgacaaagcagcattagtccgttgatcggtggaagaccactcgtcagtgttgagttgaatgtttgatcaataaaatacggcaatgctgtaagggttgttttttatgccattgataatacactgtactgttcagttgttgaactctatttcttagccatgccaagtgcttttcttattttgaataacattacagcaaaaagttgaaagacaaaaaaaaaaacccccgaacagagtgctttgggtcccaagcttctttagactgtgttcggcgttccccctaaatttctccccctatatctcactcacttgtcacatcagcgttctctttccccctatatctccacgctctacagcagttccacctatatcaaacctctataccccaccacaacaatattatatactttcatcttcaactaactcatgtaccttccaatttttttctactaataattatttacgtgcacagaaacttagcaaggagagagagagcgggaatgcggccgccaccgcggtggagctcgaattccggtccgggcctagaaggccagcttcaagtttgtacaaaaaagcaggctccggccagaatctcactgactagctaaacagcggccgcatcgagcagctggcttgtggggaccagacaaaaaaggaatggtgcagaattgttaggcgcacctaccaaaagcatctttgcctttattgcaaagataaagcagattcctctagtacaagtggggaacaaaataacgtggaaaagagctgtcctgacagcccactcactaatgcgtatgacgaacgcagtgacgaccacaaaactcgagcaacgagatcatgagccaatcaaagaggagtgatgtagacctaaagcaataatggagccatgacgtaagggcttacgcccatacgaaataattaaaggctgatgtgacctgtcggtctctcagaacctttactttttatgtttggcgtgtatttttaaatttccacggcaatgacgatgtgaccgtcgacccactaaaacattgctttgtcaaaagctaaaaaagatgatgcccgacagccacttgtgtgaagcatgagaagccggtccctccactaagaaaattagtgaagcatcttccagtggtccctccactcacagctcaatcagtgagcaacaggacgaaggaaatgacgtaagccatgacgtctaatcccagggcccggtgaccaatcgaattagcttggcgcgtggaccgaagcttgcatgcctgcagtgcagcgtgacccggtcgtgcccctctctagagataatgagcattgcatgtctaagttataaaaaattaccacatattttttttgtcacacttgtttgaagtgcagtttatctatctttatacatatatttaaactttactctacgaataatataatctatagtactacaataatatcagtgttttagagaatcatataaatgaacagttagacatggtctaaaggacaattgagtattttgacaacaggactctacagttttatctttttagtgtgcatgtgttctcctttttttttgcaaatagcttcacctatataatacttcatccattttattagtacatccatttagggtttagggttaatggtttttatagactaatttttttagtacatctattttattctattttagcctctaaattaagaaaactaaaactctattttagtttttttatttaataatttagatataaaatagaataaaataaagtgactaaaaattaaacaaataccctttaagaaattaaaaaaactaaggaaacatttttcttgtttcgagtagataatgccagcctgttaaacgccgtcgacgagtctaacggacaccaaccagcgaaccagcagcgtcgcgtcgggccaagcgaagcagacggcacggcatctctgtcgctgcctctggacccctctcgagagttccgctccaccgttggacttgctccgctgtcggcatccagaaattgcgtggcggagcggcagacgtgagccggcacggcaggcggcctcctcctcctctcacggcaccggcagctacgggggattcctttcccaccgctccttcgctttcccttcctcgcccgccgtaataaatagacaccccctccacaccctctttccccaacctcgtgttgttcggagcgcacacacacacaaccagatctcccccaaatccacccgtcggcacctccgcttcaaggtacgccgctcgtcctcccccccccccctctctaccttctctagatcggcgttccggtccatgcatggttagggcccggtagttctacttctgttcatgtttgtgttagatccgtgtttgtgttagatccgtgctgctagcgttcgtacacggatgcgacctgtacgtcagacacgttctgattgctaacttgccagtgtttctctttggggaatcctgggatggctctagccgttccgcagacgggatcgatttcatgattttttttgtttcgttgcatagggtttggtttgcccttttcctttatttcaatatatgccgtgcacttgtttgtcgggtcatcttttcatgcttttttttgtcttggttgtgatgatgtggtctggttgggcggtcgttctagatcggagtagaattctgtttcaaactacctggtggatttattaattttggatctgtatgtgtgtgccatacatattcatagttacgaattgaagatgatggatggaaatatcgatctaggataggtatacatgttgatgcgggttttactgatgcatatacagagatgctttttgttcgcttggttgtgatgatgtggtgtggttgggcggtcgttcattcgttctagatcggagtagaatactgtttcaaactacctggtgtatttattaattttggaactgtatgtgtgtgtcatacatcttcatagttacgagtttaagatggatggaaatatcgatctaggataggtatacatgttgatgtgggttttactgatgcatatacatgatggcatatgcagcatctattcatatgctctaaccttgagtacctatctattataataaacaagtatgttttataattattttgatcttgatatacttggatgatggcatatgcagcagctatatgtggatttttttagcactgccttcatacgctatttatttgcttggtactgtttcttttgtcgatgctcaccctgttgtttggtgttacttctgcaggtcgactttaacttagcctaggatccatggcggagccgaagctggaggacttcctcggcggtggaggcggcagcggtggcggaggctccggaggcggtggcatcgggctgtccatgattaagaactggctgcggagccaaccggcgcccggtggtggcggctctggtggcggtggatctggtggcggtggatctgacacgttcgggcagcgcacgtcgatttaccgtggcgtgacaaggcatagatggactgggagatatgaggcacatctttgggataacagttgcagaagggaagggcaaactcgtaagggtcgtcaagtctatttaggtggctatgataaagaggagaaagctgctagggcttatgatcttgctgctctgaagtactggggtgccacaacaacaacaaattttccagtgagtaactacgaaaaggagctcgaggacatgaagcacatgacaaggcaggagtttgtagcgtctctgagaaggaagagcagtggtttctccagaggtgcatccatttacaggggagtgactaggcatcaccaacatggaagatggcaagcacggattggacgagttgcagggaacaaggatctttacttgggcaccttcagcacccaggaggaggcagcggaggcgtacgacatcgcggcgatcaagttccgcggcctcaacgccgtcaccaacttcgacatgagccgctacgacgtgaagagcatcctggacagcagcgccctccccatcggcagcgccgccaagcgcctcaaggaggccgaggccgcagcgtccgcgcagcaccaccacgccggcgtggtgagctacgacgtcggccgcatcgcctcgcagctcggcgacggcggagccctggcggcggcgtacggcgcgcactaccacggcgccgcctggccgaccatcgcgttccagccgggcgccgccagcacaggcctgtaccacccgtacgcgcagcagccaatgcgcggcggcgggtggtgcaagcaggagcaggaccacgcggtgatcgcggccgcgcacagcctgcaggacctccaccacctgaacctgggcgcggccggcgcgcacgactttttctcggcagggcagcaggccgccgccgctgcgatgcacggcctgggtagcatcgacagtgcgtcgctcgagcacagcaccggctccaactccgtcgtctacaacggcggggtcggcgacagcaacggcgccagcgccgtcggcggcagtggcggtggctacatgatgccgatgagcgctgccggagcaaccactacatcggcaatggtgagccacgagcaggtgcatgcacgggcctacgacgaagccaagcaggctgctcagatggggtacgagagctacctggtgaacgcggagaacaatggtggcggataaggtacctgacatcttatagtctgcaacctctcgtgtctgaattcctatctttatcaagtgttattgcttccacgactataggacagctttcgtcgaaagcttttgctcatgtgatctcgaaggattcatctagtctgatttttcgtgacttgtatcggttttattggattcatccaacatatatcaataaaaaatgagttgtgtttcctttcttcctagttcagttaaaattatttccctcctgcgcttgtgctgtaattgtctgtgtacctgttgtttgtgactgtgttagttcccttggatatgatttcgtatttgatatgtacatggagatagcttagcttcattattggagtatgaagttagtatgacatagtcactctcctggaaaattgacactgcaaaccatatttttattctgaaccacaaatcctagtcagtccgctggcatatgccgtccgtttgctgaatccagaacgtgggtttggagatgtacggctgagatgcctctatgcgaaggggatttcgtggtgaaacgagatgggagtagagcaacgcccgtggaagatgcttcaaacttccacacttttgagcaacgatcggcagtagtaaggtagacgatttcaagatcaaagcatatgaagataaacaacatcaacaacaaaatttgttggggttctatagagagaaacagagctacatacatacactgttttgtatctaccatctgagatgatgaaaagatgaaaaactaaagaatgccccggcgccaacgccaggacacgccgcgcgcgcgtcacccgagccatctcttgacccagccggcgctgtatatttacacacgttgcagcatcgatcaccacctgttcgatcgcgtcgccgtcaccggcgcgccgcgacttattgaactagtctagggcgcggctaacaacctagcttagattgccttgtctaaacccttaggctaacgcgccactctagaaggccgatctcccccgaacgcgccagatccgatatcgatgggccctggccgaagcttggtcacccggtccgggcctagaaggccgatctcccgggcacccagctttcttgtacaaagtggccgttaacggatcggccagaatggcccggaccgggttaccccgcggttcaaagccaatgactgttgttaggtccagtttctaaggacgaatcatccaatcactggttctttctgaacaaaacaaagagctatagagttacgttactgtagccgagacagagcctgcaatctggttatgccacatactaggttctttcttaaagttgactcactctatcctaagttctacttacaaggagctacaacaaattggtcataaccggagagcgttcaaggaggtaatatcccatcttactctgtagcaaggctacaaaaggagagctaaagaactaggctacaaaaagagagctaaagaactaactatctagcaagactacagagctatagtgtagagatttcataaccggtgagcgttcaaggatactttgaagagaagaggtaatatctcaactagcaagactacaaaaaaatggagatataaaactaactgtctaacaagactacagagctatagtagagatagatacgttcgacacttaagcatgagaattcgagctcggtaccctggttcacaaactcaatacaacacacagtggagtagggtattacgctccggcggcccgaaccactctaaatccttgtgtcctcgtgtgctcttccaccattaatgactgtaattgcagggacacgaagagttgtagcgcttttgccaacaagatccgctatatgctagtagagtggaacctgcacagcaacaagcatccaataatctgagaataagaattatgtgtggtgatggttctcatctctgcaactcgccattttcgcgagagaaccaaatccaagttggtgaagatcatgatttgggctcatgggctggcatagtagctattacctttgcaattgtggttcgaatctatccgatattctccttttcagggagagctaatgcttatgcttattgggtattttggtttgacactgcttcacgcccaaaaaaaggcaactatgtctgagttggatatggcccaaaaaaaggcagctatgtctgagttggatatggaagtcttctttcgtttagggtgaagtaagaccaagctcatgagcttattatcttaggtcggaacaaattagttgataggcatggcacatttatcaaattataatgattttaacagaaaagcaacacctctttttcagcagcaccagctttgcaagctgcaattgacactccaagcatagtatttgctccaaactcagcctgcatttcgcacaatatcatatctatttccatttggataaaatatattttccagaaatatgggaacagaatcaagatacagaaaaaagttgtggtagtagtggtaagtggaaacacaagtacagtgaaaagatagcattatttctgaacagtcaaattaaccgaaataagtagtatcacatactgcccctaaattgactacacccaatgtaaagaattgcttgagcatattgagccatcagttgtttgtttgtgtaacggatttgacaatgcagagttcaggagcaaaaaaccgcaaaggagagaaagagggaaaggatctcctagtatcccaccttgtggcgcgccctgtcaagtgcatgatggcctggtcgatctgcgtctgctgctgcggttccatcccaacgagtgcctccgacaccttgtcgttgatcacccgcaccgcgtaggcgacccccctggcgaggaacttccgcctctcggaggccccggccgcgtcggcggcggcgccctcgagcgcgcccacgctagccgtagatgctcggtgcacggccttgttggtgtgcaactcgacctcaacggccggtgcgctacgcccgtcaaggatctggcgcgcccgcaccctcgtgatcacggtgggcgcctcccgcctcatgtggccgacgatgaaaagcgccgggttaggggccttggcgcgcaccgccgtattcagggcctcctcgctcttgcgcgagagcaggtgcttccccaggtactcctgcactgacaaggctgccacagcggtggaatttgtcctcacgacttcgccacgtcgtcctcacctccctggcttcccacgactccgccgtatcgaggtgctcggtgggtcgtcttaatccgaagtccgaactaggaagacgagacagagaggtctgaggaatgggcctcgtttgatgttgagctgaattatttttccagcataagcccaggtcttggtccatgaacaaaattactagaaacccagcccagtactacgatctaaaagagggactgccactggatagctctctctagcattctccacgctccaatacagcggcgtcgtgtctatccgggtctatccgcgaacacgtgagaactctccagaaactgctttctcctccacttcatctctctcgctttccctctataaaaagaccccttctaggaattgagggagacagcaagcaccaagcagcgatccgaagctcaatcaattcactcaaacctcttccccaaatcttcgattagatcttcgttgacaagaagactagaaccgaacctgacatgtccaacctgctcacggttcaccagaaccttccggctcttccagtggacgcgacgtccgatgaagtcaggaagaacctcatggacatgttccgcgacaggcaagcgttcagcgagcacacctggaagatgctgctctccgtctgccgctcctgggctgcatggtgcaagctgaacaacaggaagtggttccccgctgagcccgaggacgtgagggattaccttctgtacctgcaagcgcgaggtttgtttctgcttctacctttgatatatatataataattatcattaattagtagtaatataatatttcaaatatttttttcaaaataaaagaatgtagtatatagcaattgcttttctgtagtttataagtgtgtatattttaatttataacttttctaatatatgaccaaaacatggtgatgcctaggtctggcagtgaagaccatccagcaacaccttggacaactgaacatgcttcacaggcgctccggcctcccgcgccccagcgactcgaacgccgtgagcctcgtcatgcgccgcatcaggaaggaaaacgtcgatgccggcgaaagggcaaagcaggccctcgcgttcgagaggaccgatttcgaccaggtccgcagcctgatggagaacagcgacaggtgccaggacattaggaacctggcgttcctcggaattgcatacaacacgctcctcaggatcgcggaaattgcccgcattcgcgtgaaggacattagccgcaccgacggcggcaggatgcttatccacattggcaggaccaagacgctcgtttccaccgcaggcgtcgaaaaggccctcagcctcggagtgaccaagctcgtcgaacgctggatctccgtgtccggcgtcgcggacgacccaaacaactacctcttctgccgcgtccgcaagaacggggtggctgcccctagcgccaccagccaactcagcacgagggccttggaaggtattttcgaggccacccaccgcctgatctacggcgcgaaggatgacagcggtcaacgctacctcgcatggtccgggcactccgcccgcgttggagctgctagggacatggcccgcgccggtgtttccatccccgaaatcatgcaggcgggtggatggacgaacgtgaacattgtcatgaactacattcgcaaccttgacagcgagacgggcgcaatggttcgcctcctggaagatggtgactgaggtacccaacctagacttgtccatcttctggattggccaacttaattaatgtatgaaataaaaggatgcacacatagtgacatgctaatcactataatgtgggcatcaaagttgtgtgttatgtgtaattactagttatctgaataaaagagaaagagatcatccatatttcttatcctaaatgaatgtcacgtgtctttataattctttgatgaaccagatgcatttcattaaccaaatccatatacatataaatattaatcatatataattaatatcaattgggttagcaaaacaaatctagtctaggtgtgttttgcgatccgatatcgaattggccacggtaccagctgctgctgttctagggttcacaagtctgcctatttgtcttccccaatggagctatggttgtctggtctggtccttggtcgtgtcccgtttcattgtgtactatttacctgtaatgtgtatccttaagtctggtttgatggtgtctgaaacgttttgctgtggtagagcagcatggaagaactataatgaataagtgatccctaatcattgtgtccaaattttgcttctgctatacccttttgtgctgtttcttatgttttgcttaaaaatttgatctgacaaacaaatttgtctaaattatgctcttgttctgactgtgtactgtacacatttgtattgctaccggtttggcacatagttttctctttgattgcagatcaaacccttctgattgcagattgcttggctatggctgatgtgctcactgttcttctttagcttgtatattgctgatggtggcttggctacggctgaaaaagttgctgctgcgccgacttggcaactgttgctccagtaatgctttgtcctctcttcctagccgccgacttggcacttggcagctgttgctcctgtaatgcgttgttatctcttatctcttgagatgtactatgattttgaggctgtttgacttgtgccagattgccagtgctgatgctatattatctcaggtttttatgctagtatatgttttactgtgtgctgcctgtgtcgagttacgtaatctattgaaccgctatgcgtgttgatgccctgttgttgcttgccagattgatgcccctgttgcttgcagcttgcaagctgtagtgaaatcctaaaattccaaaccaaatctattctgaacttttgaagatctgtgatgtccggaagaaaagattcaaacagataaacgggactctccagaatctataaaataaatgatcgacaaacgctttgctttggtaggcttcaagcttggtcacccggtccgggcctagaaggccagcttcggccgccccgggcaactttattatacaaagttgatagataaatcagatatctggttcctaaggacccggcggaccgattaaactgattcggtccgacgcgttacctaataacttcgtatagcatacattatacgaagttattagctaactaactagtaagcgtacacctgagcggttaccgaattcctgcccttaaggccaattgttcaagattcattcaacaattgaaacatctcccatgattaaatcagtataaggttgctatggtcttgcttgacaaagtttttttttgagggaatttcaactaaatttttgagtgaaactatcaaatactgattttaaaaaatttttataaaaggaagcgcagagataaaaggccatctatgctacaaaagtacccaaaaatgtaatcctaaagtatgaattgcattttttttttgtttggacgaaaggaaaggagtattaccacaagaatgatatcatcttcatatttagatcttttttgggtaaagcttgagattctctaaatatagagaaatcagaagaaaaaaaaaccgtgttttggtggttttgatttctagcctccacaataactttgacggcgtcgacaagtctaacggacaccaagcagcgaaccaccagcgccgagccaagcgaagcagacggccgagacgttgacaccttcggcgcggcatctctcgagagttccgctccggcgctccacctccaccgctggcggtttcttattccgttccgttccgcctcctgctctgctcctctccacaccacacggcacgaaaccgttacggcaccggcagcacccagcacgggagaggggattcctttcccaccgttccttccctttccgccccgccgctataaatagccagccccatccccagcttttttccccaatctcatctcctctctcctgttgttcggagcacacgcacaatccgatcgatccccaaatccccttcgtctctcctcgcgagcctcgtggatcccagcttcaaggtacggcgatcgatcatcccccctccttctctctaccttcttttctctagactacatcggatggcgatccatggttagggcctgctagtttcccttcctgttttgtcgatggctgcgaggcacaatagatctgatggcgttatgacggctaacttgtcatgttgttgcgatttatagtccctttaggagatcagtttaatttctcggatggttcgagatcggtggtccatggttagtaccctaagatccgcgctgttagggttcgtagatggaggcgacctgttctgattgttaacttgtcagtacctgggaaatcctgggatggttctagctcgtccgcagatgagatcgatttcatgatcctctgtatcttgtttcgttgcctaggttccgtctaatctatccgtggtatgatgtagatgttttgatcgtgctaactacgtcttgtaaagttaattgtcaggtcataatttttagcatgcctttttttttgtttggttttgtctaattgggctgtcgttctagatcagagtagaagactgttccaaactacctgctggatttattgaacttggatctgtatgtgtgtcacatatcttcataaattcatgattaagatggattgaaatatcttttatctttttggtatggatagttctatatgttggtgtggctttgttagatgtatacatgcttagatacatgaagcaacgtgctgctactgtttagtaattgctgttcatttgtctaataaacagataaggatatgtatttatgttgctgttggttttgctggtactttgttggatacaaatgcttcaatacagaaaacagcatgctgctacgatttaccatttatctaatcttatcatatgtctaatctaataaacaaacatgcttttaaattatcttcatatgcttggatgatggcatacacagcggctatgtgtggttttttaaatacccagcatcatgggcatgcatgacactgctttaatatgctttttatttgcttgagactgtttcttttgtttatactgaccctttagttcggtgactcttctgcaggtcgactttaacttagcctaggatccatggcccagtccaagcacggcctgaccaaggagatgaccatgaagtaccgcatggagggctgcgtggacggccacaagttcgtgatcaccggcgagggcatcggctaccccttcaagggcaagcaggccatcaacctgtgcgtggtggagggcggccccttgcccttcgccgaggacatcttgtccgccgccttcatgtacggcaaccgcgtgttcaccgagtacccccaggacatcgtcgactacttcaagaactcctgccccgccggctacacctgggaccgctccttcctgttcgaggacggcgccgtgtgcatctgcaacgccgacatcaccgtgagcgtggaggagaactgcatgtaccacgagtccaagttctacggcgtgaacttccccgccgacggccccgtgatgaagaagatgaccgacaactgggagccctcctgcgagaagatcatccccgtgcccaagcagggcatcttgaagggcgacgtgagcatgtacctgctgctgaaggacggtggccgcttgcgctgccagttcgacaccgtgtacaaggccaagtccgtgccccgcaagatgcccgactggcacttcatccagcacaagctgacccgcgaggaccgcagcgacgccaagaaccagaagtggcacctgaccgagcacgccatcgcctccggctccgccttgccctccggactcagatctcgatagggtaccaatggccagttaacagatccagctgctgctgttctagggttcacaagtctgcctatttgtcttccccaatggagctatggttgtctggtctggtccttggtcgtgtcccgtttcattgtgtactatttacctgtaatgtgtatccttaagtctggtttgatggtgtctgaaacgttttgctgtggtagagcagcatggaagaactataatgaataagtgatccctaatcattgtgtccaaattttgcttctgctatacccttttgtgctgtttcttatgttttgcttaaaaatttgatctgacaaacaaatttgtctaaattatgctcttgttctgactgtgtactgtacacatttgtattgctaccggtttggcacatagttttctctttgattgcagatcaaacccttctgattgcagattgcttggctatggctgatgtgctcactgttcttctttagcttgtatattgctgatggtggcttggctacggctgaaaaagttgctgctgcgccgacttggcaactgttgctccagtaatgctttgtcctctcttcctagccgccgacttggcacttggcagctgttgctcctgtaatgcgttgttatctcttatctcttgagatgtactatgattttgaggctgtttgacttgtgccagattgccagtgctgatgctatattatctcaggtttttatgctagtatatgttttactgtgtgctgcctgtgtcgagttacgtaatctattgaaccgctatgcgtgttgatgccctgttgttgcttgccagattgatgcccctgttgcttgcagcttgcaagctgtagtgaaatcctaaaattcgaaaccaaatctattctgaacttttgaagatctgtgatgtccggaagaaaagattcaaacagataaacgggactctccagaatctataaaataaatgatcgacaaacgctttgctttggtaggcttcctagttagttagcggaccgaagcttcggtccgggcctgcggccgcagatatcagaacctgcgtctggacgcacaagtcatagcattatcggctaaaatttcttaatttctaaattagtcatatcggctaagaaagtggggagcactatcatttcgtagaacaagaacaaggtatcatatatatatatatatataatatttaaactttgttaagtggaatcaaagtgctagtattaatggagtttcatgtgcattaaattttatgtcacatcagcaattttgttgacttggcaaggtcatttagggtgtgtttggaagacaggggctattaggagtattaaacatagtctaattacaaaactaattgcacaaccgctaagctgaatcgcgagatggatctattaagcttaattagtccatgatttgacaatgtggtgctacaataaccatttgctaatgatggattacttaggtttaatagattcgtctcgtgatttagcctatgggttctgctattaattttgtaattagctcatatttagttcttataattagtatccgaacatccaatgtgacatgctaaagtttaaccctggtatccaaatgaagtcttatgagagtttcatcactccggtggtatatgtacttaggctccgttttcttccaccgacttatttttagcacccgtcacattgaatgtttagatactaattagaagtattaaacgtagactatttacaaaatccattacataagacgaatctaaacggcgagacgaatctattaaacctaattagtccatgatttgacaatgtgttgctacagtaaacatttgctaatgatggattaattaggcttaatagattcgtctcgccgtttagcctccacttatgtaatgggttttctaaacaatctacgtttaatactcctaattagtatctaaatattcaatgtgacacgtgctaaaaataagtcagtggaaggaagagaacgtccccttagttttccatcttattaattgtacgatgaaactgtgcagccagatgattgacaatcgcaatacttcaactagtgggccatgcacatcagcgacgtgtaacgtcgtgagttgctgttcccgtagagaaatatcaactggtgggccacgcacatcagcgtcgtgtaacgtggacggaggagccccgtgacggcgtcgacatcgaacggccaccaaccacggaaccacccgtccccacctctcggaagctccgctccacggcgtcgacatctaacggctaccagcaggcgtacgggttggagtggactccttgcctctttgcgctggcggcttccggaaattgcgtggcggagacgaggcgggctcgtctcacacggcacggaagacgtcacgggttccttccccacctctcctcttccccaccgccataaatagccgaccccctcgcctttctccccaatctcatctcgtctcgtgttgttcggagcacaccacccgccccaaatcgttcttcccgcaagcctcggcgatccttcacccgcttcaaggtacggcgatcgtcttcctcctctagatcggcgtgatctgcaagtagttgatttggtagatggttaggatctgtgcactgaagaaatcatgttagatccgcgatgtttctgttcgtagatggctgggaggtggaatttttgtgtagatctgatatgttctcctgtttatcttgtcacgctcctgcgatttgtggggattttaggtcgttgatctgggaatcgtggggttgcttctaggctgttcgtagatgaggtcgttctcacggtttactggatcattgcctagtagatcagctcgggctttcgtctttgtatatggtgcccatacttgcatctatgatctggttccgtggtgttacctaggtttctgcgcctgattcgtccgatcgattttgttagcatgtggtaaacgtttggtcatggtctgatttagattagagtcgaataggatgatctcgatctagctcttgggattaatatgcatgtgtcaccaatctgttccgtggttaagatgatgaatctatgcttagttaatgggtgtagatatatatgctgctgttcctcaatgatgccgtagcttttacctgagcagcatggatcgtcctgttacttaggtagatgcacatgcttatagatcaagatatgtactgctactgttggaattctttagtatacctgatgatcatccatgctcttgttacttgttttggtatacttggatgatggcatgctgctgctttttgttgatttgagcccatccatatctgcatatgtcacatgattaagatgattacgctgtttctgtatgatgccatagcttttatgtgagcaacatgcatcctcctggttatatgcattaatagatggaagatatctattgctacaatttgatgattattttgtacatacgatgatcaagcatgctcttcatactttgttgatatacttggataatgaaatgctgctgcacgttcattctatagcactaatgatgtgatgaacacgcacgacctgtttgtggcatctgtttgaatgtgttgttgctgttcactagagactgttttattaacctactgctagatacttacccttctgtctgtttattcttttgcagccagaatagcggatccgcccatggtcgaacaggacggcctgcatgcaggatcaccagcggcctgggtcgaaagactcttcggctacgactgggcacaacagaccatcgggtgtagcgacgcagctgttttcaggctgtccgcacagggcagacccgttttgttcgtcaaaacagacctgtctggcgcgctcaacgaactgcaagacgaggccgcaagactgagctggcttgctaccacaggcgttccttgtgctgcagtcctcgacgtcgttactgaggctggaagagactggctgctcctgggtgaagtcccaggacaggaccttttgtccagccatctggcacctgccgaaaaggtcagcatcatggcagacgccatgagaaggctgcacacactcgaccctgcaacatgccccttcgatcaccaggcaaaacacaggatcgagcgcgcaagaacgcgcatggaggctggtttggtcgaccaagatgacctcgacgaggaacaccaaggactggctcctgctgaactcttcgccagactcaaggcgagaatgccagacggtgacgacctggtcgtcacacacggcgacgcttgtctcccaaacataatggtcgagaacggacgcttcagcggtttcatcgactgcggtagactcggagtcgctgacagataccaggacatcgccctggcaacacgcgacatcgcagaggaactcggaggcgaatgggctgacaggtttctcgtgctctacggtatcgctgctccagacagccagaggatcgcattctacaggctcctcgacgagttcttttagttcgaacggtacccggggatcctctagtgccgtgggtcgtttaagctgccgctgtacctgtgtcgtctggtgccttctggtgtacctgggaggttgtcgtctatcaagtatctgtggttggtgtcatgagtcagtgagtcccaatactgttcgtgtcctgtgtgcattatacccaaaactgttatgggcaaatcatgaataagcttgatgttcgaacttaaaagtctctgctcaatatggtattatggttgtttttgttcgtctcctaatatttgcctgggatcaaattttattggctggtgttcatttgacctccatgttcttgctaggctccattttttactctacagccataatatgtttgattgtttggtttgttctttgttgtacacctggttctgtcgagcttagttttcgacactggcttacagcttaacatgttgctattttattgggttctgattgctattttattgggttctgattgctagtttttgctgaatccaaaaaccatgttatttatttaagcgatccaggttattattatgatggtggctaagtttttttttttccaagggtaaattttctggattctccagtgtttctgtggccgaattcaatcactagagtcgacctgcatgattccgatgacttcgtaggttcctagctcaagccgctcgtgtccaagcgtcacttacgattagctaatgattacggcatctaggaccgactagctagctagctaagagctcggtaccgagctcgaattcattccgattaatcgtggcctcttgctcttcaggatgaagagctatgtttaaacgtgcaagcgctactagacaattcagtacattaaaaacgtccgcaatgtgttattaagttgtctaagcgtcaatttgtttacaccacaatatatcctgcca

SEQ ID NO: 7 - DNA, 22042 bp, synthetic construct
  source 1..22042: mol_type = other DNA
gtttacccgccaatatatcctgtcaaacactgcggccgcacttgaccgcggatggagccggagctgtggtgaggccatcgacgggaggtgggggagaacacagtctcagtgttctttgtgagtccgcaaggtttttagcttttctgtattaattaaggttgctgttggctgtagaatacggtcgtggaagagctgtatcggtagctactacgtaagctattatatactggaagtctggagctcgtcgatctccggtcgtcttcctccatttctcctcgtcttgctttgactgctgctaccatttgcttctgttttctgatgaagcatgccatgtcggccaccagtgtttgtgtggtttttgcagggaatggctttcaagtgctgtgattgaatggccctcgtcgtcctcggctgagctcacatggacgcgtcatgtgagtgagatatatgatcatatgatgagtggggttcgggtgagtgcgtacttgaagtaggatcccgctttcactcattcattcattggcctttaaaccgggaaattttcgcgaggagatggagggaagcaagcagggtgacgagtgcagagtgccgcgagcgctttgtcaaaaggcaccgccgtaggcaaaaaaatcaatggccctgactgactcgatggtagtactactgtagagactagagagggttgctccccatatcttcgtgtgacttttactccagcattgcatttccgtcattgagacgttaattaatagcagctttcgggacagatgactgtggccatgtttcgtcacggccgcttcgtgccagctgggggtactatagtactgtgattttgttagtaaaaactttcattaggccaccattgacgaccgggccttcgcttttgctgcgctaattaaccatttcccggcgaccgaagggaacatgaacatgccccgacacatgagggcatgaggactagtgttctccctgtcgttcgttgacttgactagtgatagtttaaacgctcttcaactggaagagcggttactaccggttcactagctagctgctaatcgagctagttaccctatgaggtgacatgaagcgctcacggttactatgacggttagcttcacgactgttggtggcagtagcgtacgacttagctatagttccggacttacccttaagataacttcgtatagcatacattatacgaagttatgggcccacgcgtgaagagcggttaccagagctggtcacctttgtccaccaagatggaactgtcttcggccagaatggccatctggattcagcaggcctagaaggccatttatcgctatcaactttgtatagaaaagttgggccgaattcgagctcggtacggccagaatggcccggaccgaagcttgcggccgcacactgatagtttaaactgaaggcgggaaacgacaatctgatcatgagcggagaattaagggagtcacgttatgacccccgccgatgacgcgggacaagccgttttacgtttggaactgacagaaccgcaacgttgaaggagccactcagccgcgggtttctggagtttaatgagctaagcacatacgtcagaaaccattattgcgcgttcaaaagtcgcctaaggtcactatcagctagcaaatatttcttgtcaaaaatgctccactgacgttccataaattcccctcggtatccaattagagtctcatattcactctcccgggggatctcgactctagaggatcgctcaggaaggccgctgagatagaggcatggcggccaatgcgggcggcggtggagcgggaggaggcagcggcagcggcagcgtggctgcgccggcggtgtgccgccccagcggctcgcggtggacgccgacgccggagcagatcaggatgctgaaggagctctactacggctgcggcatccggtcgcccagctcggagcagatccagcgcatcaccgccatgctgcggcagcacggcaagatcgagggcaagaacgtcttctactggttccagaaccacaaggcccgcgagcgccagaagcgccgcctcaccagcctcgacgtcaacgtgcccgccgccggcgcggccgacgccaccaccagccaactcggcgtcctctcgctgtcgtcgccgccgccttcaggcgcggcgcctccctcgcccaccctcggcttctacgccgccggcaatggcggcggatcggctgtgctgctggacacgagttccgactggggcagcagcggcgctgccatggccaccgagacatgcttcctgcaggactacatgggcgtgacggacacgggcagctcgtcgcagtggccacgcttctcgtcgtcggacacgataatggcggcggccgcggcgcgggcggcgacgacgcgggcgcccgagacgctccctctcttcccgacctgcggcgacgacggcggcagcggtagcagcagctacttgccgttctggggtgccgcgtccacaactgccggcgccacttcttccgttgcgatccagcagcaacaccagctgcaggagcagtacagcttttacagcaacagcaacagcacccagctggccggcaccggcaaccaagacgtatcggcaacagcagcagcagccgccgccctggagctgagcctcagctcatggtgctccccttaccctgctgcagggagtatgtgagagcaacgcgagctgccactgctcttcactgatgtctctggaatggaaggaggaggaagtgagcatagcgttggtgcgttgctgtcaagggcgaattcacatggttaaccgacaaagcagcattagtccgttgatcggtggaagaccactcgtcagtgttgagttgaatgtttgatcaataaaatacggcaatgctgtaagggttgttttttatgccattgataatacactgtactgttcagttgttgaactctatttcttagccatgccaagtgcttttcttattttgaataacattacagcaaaaagttgaaagacaaaaaaaaaaacccccgaacagagtgctttgggtcccaagcttctttagactgtgttcggcgttccccctaaatttctccccctatatctcactcacttgtcacatcagcgttctctttccccctatatctccacgctctacagcagttccacctatatcaaacctctataccccaccacaacaatattatatactttcatcttcaactaactcatgtaccttccaatttttttctactaataattatttacgtgcacagaaacttagcaaggagagagagagcgggaatgcggccgccaccgcggtggagctcgaattccggtccgggcctagaaggccagcttcaagtttgtacaaaaaagcaggctccggccagaatctcactgactagctaaacagcggccgcatcgagcagctggcttgtggggaccagacaaaaaaggaatggtgcagaattgttaggcgcacctaccaaaagcatctttgcctttattgcaaagataaagcagattcctctagtacaagtggggaacaaaataacgtggaaaagagctgtcctgacagcccactcactaatgcgtatgacgaacgcagtgacgaccacaaaactcgagcaacgagatcatgagccaatcaaagaggagtgatgtagacctaaagcaataatggagccatgacgtaagggcttacgcccatacgaaataattaaaggctgatgtgacctgtcggtctctcagaacctttactttttatgtttggcgtgtatttttaaatttccacggcaatgacgatgtgaccgtcgacccactaaaacattgctttgtcaaaagctaaaaaagatgatgcccgacagccacttgtgtgaagcatgagaagccggtccctccactaagaaaattagtgaagcatcttccagtggtccctccactcacagctcaatcagtgagcaacaggacgaaggaaatgacgtaagccatgacgtctaatcccagggcccggtgaccaatcgaattagcttggcgcgtggaccgaagcttgcatgcctgcagtgcagcgtgacccggtcgtgcccctctctagagataatgagcattgcatgtctaagttataaaaaattaccacatattttttttgtcacacttgtttgaagtgcagtttatctatctttatacatatatttaaactttactctacgaataatataatctatagtactacaataatatcagtgttttagagaatcatataaatgaacagttagacatggtctaaaggacaattgagtattttgacaacaggactctacagttttatctttttagtgtgcatgtgttctcctttttttttgcaaatagcttcacctatataatacttcatccattttattagtacatccatttagggtttagggttaatggtttttatagactaatttttttagtacatctattttattctattttagcctctaaattaagaaaactaaaactctattttagtttttttatttaataatttagatataaaatagaataaaataaagtgactaaaaattaaacaaataccctttaagaaattaaaaaaactaaggaaacatttttcttgtttcgagtagataatgccagcctgttaaacgccgtcgacgagtctaacggacaccaaccagcgaaccagcagcgtcgcgtcgggccaagcgaagcagacggcacggcatctctgtcgctgcctctggacccctctcgagagttccgctccaccgttggacttgctccgctgtcggcatccagaaattgcgtggcggagcggcagacgtgagccggcacggcaggcggcctcctcctcctctcacggcaccggcagctacgggggattcctttcccaccgctccttcgctttcccttcctcgcccgccgtaataaatagacaccccctccacaccctctttccccaacctcgtgttgttcggagcgcacacacacacaaccagatctcccccaaatccacccgtcggcacctccgcttcaaggtacgccgctcgtcctcccccccccccctctctaccttctctagatcggcgttccggtccatgcatggttagggcccggtagttctacttctgttcatgtttgtgttagatccgtgtttgtgttagatccgtgctgctagcgttcgtacacggatgcgacctgtacgtcagacacgttctgattgctaacttgccagtgtttctctttggggaatcctgggatggctctagccgttccgcagacgggatcgatttcatgattttttttgtttcgttgcatagggtttggtttgcccttttcctttatttcaatatatgccgtgcacttgtttgtcgggtcatcttttcatgcttttttttgtcttggttgtgatgatgtggtctggttgggcggtcgttctagatcggagtagaattctgtttcaaactacctggtggatttattaattttggatctgtatgtgtgtgccatacatattcatagttacgaattgaagatgatggatggaaatatcgatctaggataggtatacatgttgatgcgggttttactgatgcatatacagagatgctttttgttcgcttggttgtgatgatgtggtgtggttgggcggtcgttcattcgttctagatcggagtagaatactgtttcaaactacctggtgtatttattaattttggaactgtatgtgtgtgtcatacatcttcatagttacgagtttaagatggatggaaatatcgatctaggataggtatacatgttgatgtgggttttactgatgcatatacatgatggcatatgcagcatctattcatatgctctaaccttgagtacctatctattataataaacaagtatgttttataattattttgatcttgatatacttggatgatggcatatgcagcagctatatgtggatttttttagcactgccttcatacgctatttatttgcttggtactgtttcttttgtcgatgctcaccctgttgtttggtgttacttctgcaggtcgactttaacttagcctaggatccatggcggagccgaagctggaggacttcctcggcggtggaggcggcagcggtggcggaggctccggaggcggtggcatcgggctgtccatgattaagaactggctgcggagccaaccggcgcccggtggtggcggctctggtggcggtggatctggtggcggtggatctgctgagcccaagctcgaagactttctgggtggtggaggcggctcgggtggcggaggctccggaggcggtggctcgattggcctctcgatgatcaagaattggctccgctcccagcccgctccggggggtggtggaagcggtggaggcggctcgggcggaggagggtcggacacgttcgggcagcgcacgtcgatttaccgtggcgtgacaaggcatagatggactgggagatatgaggcacatctttgggataacagttgcagaagggaagggcaaactcgtaagggtcgtcaagtctatttaggtggctatgataaagaggagaaagctgctagggcttatgatcttgctgctctgaagtactggggtgccacaacaacaacaaattttccagtgagtaactacgaaaaggagctcgaggacatgaagcacatgacaaggcaggagtttgtagcgtctctgagaaggaagagcagtggtttctccagaggtgcatccatttacaggggagtgactaggcatcaccaacatggaagatggcaagcacggattggacgagttgcagggaacaaggatctttacttgggcaccttcagcacccaggaggaggcagcggaggcgtacgacatcgcggcgatcaagttccgcggcctcaacgccgtcaccaacttcgacatgagccgctacgacgtgaagagcatcctggacagcagcgccctccccatcggcagcgccgccaagcgcctcaaggaggccgaggccgcagcgtccgcgcagcaccaccacgccggcgtggtgagctacgacgtcggccgcatcgcctcgcagctcggcgacggcggagccctggcggcggcgtacggcgcgcactaccacggcgccgcctggccgaccatcgcgttccagccgggcgccgccagcacaggcctgtaccacccgtacgcgcagcagccaatgcgcggcggcgggtggtgcaagcaggagcaggaccacgcggtgatcgcggccgcgcacagcctgcaggacctccaccacctgaacctgggcgcggccggcgcgcacgactttttctcggcagggcagcaggccgccgccgctgcgatgcacggcctgggtagcatcgacagtgcgtcgctcgagcacagcaccggctccaactccgtcgtctacaacggcggggtcggcgacagcaacggcgccagcgccgtcggcggcagtggcggtggctacatgatgccgatgagcgctgccggagcaaccactacatcggcaatggtgagccacgagcaggtgcatgcacgggcctacgacgaagccaagcaggctgctcagatggggtacgagagctacctggtgaacgcggagaacaatggtggcggataaggtacctgacatcttatagtctgcaacctctcgtgtctgaattcctatctttatcaagtgttattgcttccacgactataggacagctttcgtcgaaagcttttgctcatgtgatctcgaaggattcatctagtctgatttttcgtgacttgtatcggttttattggattcatccaacatatatcaataaaaaatgagttgtgtttcctttcttcctagttcagttaaaattatttccctcctgcgcttgtgctgtaattgtctgtgtacctgttgtttgtgactgtgttagttcccttggatatgatttcgtatttgatatgtacatggagatagcttagcttcattattggagtatgaagttagtatgacatagtcactctcctggaaaattgacactgcaaaccatatttttattctgaaccacaaatcctagtcagtccgctggcatatgccgtccgtttgctgaatccagaacgtgggtttggagatgtacggctgagatgcctctatgcgaaggggatttcgtggtgaaacgagatgggagtagagcaacgcccgtggaagatgcttcaaacttccacacttttgagcaacgatcggcagtagtaaggtagacgatttcaagatcaaagcatatgaagataaacaacatcaacaacaaaatttgttggggttctatagagagaaacagagctacatacatacactgttttgtatctaccatctgagatgatgaaaagatgaaaaactaaagaatgccccggcgccaacgccaggacacgccgcgcgcgcgtcacccgagccatctcttgacccagccggcgctgtatatttacacacgttgcagcatcgatcaccacctgttcgatcgcgtcgccgtcaccggcgcgccgcgacttattgaactagtctagggcgcggctaacaacctagcttagattgccttgtctaaacccttaggctaacgcgccactctagaaggccgatctcccccgaacgcgccagatccgatatcgatgggccctggccgaagcttggtcacccggtccgggcctagaaggccgatctcccgggcacccagctttcttgtacaaagtggccgttaacggatcggccagaatggcccggaccgggttaccccgcggttcaaagccaatgactgttgttaggtccagtttctaaggacgaatcatccaatcactggttctttctgaacaaaacaaagagctatagagttacgttactgtagccgagacagagcctgcaatctggttatgccacatactaggttctttcttaaagttgactcactctatcctaagttctacttacaaggagctacaacaaattggtcataaccggagagcgttcaaggaggtaatatcccatcttactctgtagcaaggctacaaaaggagagctaaagaactaggctacaaaaagagagctaaagaactaactatctagcaagactacagagctatagtgtagagatttcataaccggtgagcgttcaaggatactttgaagagaagaggtaatatctcaactagcaagactacaaaaaaatggagatataaaactaactgtctaacaagactacagagctatagtagagatagatacgttcgacacttaagcatgagaattcgagctcggtaccctggttcacaaactcaatacaacacacagtggagtagggtattacgctccggcggcccgaaccactctaaatccttgtgtcctcgtgtgctcttccaccattaatgactgtaattgcagggacacgaagagttgtagcgcttttgccaacaagatccgctatatgctagtagagtggaacctgcacagcaacaagcatccaataatctgagaataagaattatgtgtggtgatggttctcatctctgcaactcgccattttcgcgagagaaccaaatccaagttggtgaagatcatgatttgggctcatgggctggcatagtagctattacctttgcaattgtggttcgaatctatccgatattctccttttcagggagagctaatgcttatgcttattgggtattttggtttgacactgcttcacgcccaaaaaaaggcaactatgtctgagttggatatggcccaaaaaaaggcagctatgtctgagttggatatggaagtcttctttcgtttagggtgaagtaagaccaagctcatgagcttattatcttaggtcggaacaaattagttgataggcatggcacatttatcaaattataatgattttaacagaaaagcaacacctctttttcagcagcaccagctttgcaagctgcaattgacactccaagcatagtatttgctccaaactcagcctgcatttcgcacaatatcatatctatttccatttggataaaatatattttccagaaatatgggaacagaatcaagatacagaaaaaagttgtggtagtagtggtaagtggaaacacaagtacagtgaaaagatagcattatttctgaacagtcaaattaaccgaaataagtagtatcacatactgcccctaaattgactacacccaatgtaaagaattgcttgagcatattgagccatcagttgtttgtttgtgtaacggatttgacaatgcagagttcaggagcaaaaaaccgcaaaggagagaaagagggaaaggatctcctagtatcccaccttgtggcgcgccctgtcaagtgcatgatggcctggtcgatctgcgtctgctgctgcggttccatcccaacgagtgcctccgacaccttgtcgttgatcacccgcaccgcgtaggcgacccccctggcgaggaacttccgcctctcggaggccccggccgcgtcggcggcggcgccctcgagcgcgcccacgctagccgtagatgctcggtgcacggccttgttggtgtgcaactcgacctcaacggccggtgcgctacgcccgtcaaggatctggcgcgcccgcaccctcgtgatcacggtgggcgcctcccgcctcatgtggccgacgatgaaaagcgccgggttaggggccttggcgcgcaccgccgtattcagggcctcctcgctcttgcgcgagagcaggtgcttccccaggtactcctgcactgacaaggctgccacagcggtggaatttgtcctcacgacttcgccacgtcgtcctcacctccctggcttcccacgactccgccgtatcgaggtgctcggtgggtcgtcttaatccgaagtccgaactaggaagacgagacagagaggtctgaggaatgggcctcgtttgatgttgagctgaattatttttccagcataagcccaggtcttggtccatgaacaaaattactagaaacccagcccagtactacgatctaaaagagggactgccactggatagctctctctagcattctccacgctccaatacagcggcgtcgtgtctatccgggtctatccgcgaacacgtgagaactctccagaaactgctttctcctccacttcatctctctcgctttccctctataaaaagaccccttctaggaattgagggagacagcaagcaccaagcagcgatccgaagctcaatcaattcactcaaacctcttccccaaatcttcgattagatcttcgttgacaagaagactagaaccgaacctgacatgtccaacctgctcacggttcaccagaaccttccggctcttccagtggacgcgacgtccgatgaagtcaggaagaacctcatggacatgttccgcgacaggcaagcgttcagcgagcacacctggaagatgctgctctccgtctgccgctcctgggctgcatggtgcaagctgaacaacaggaagtggttccccgctgagcccgaggacgtgagggattaccttctgtacctgcaagcgcgaggtttgtttctgcttctacctttgatatatatataataattatcattaattagtagtaatataatatttcaaatatttttttcaaaataaaagaatgtagtatatagcaattgcttttctgtagtttataagtgtgtatattttaatttataacttttctaatatatgaccaaaacatggtgatgcctaggtctggcagtgaagaccatccagcaacaccttggacaactgaacatgcttcacaggcgctccggcctcccgcgccccagcgactcgaacgccgtgagcctcgtcatgcgccgcatcaggaaggaaaacgtcgatgccggcgaaagggcaaagcaggccctcgcgttcgagaggaccgatttcgaccaggtccgcagcctgatggagaacagcgacaggtgccaggacattaggaacctggcgttcctcggaattgcatacaacacgctcctcaggatcgcggaaattgcccgcattcgcgtgaaggacattagccgcaccgacggcggcaggatgcttatccacattggcaggaccaagacgctcgtttccaccgcaggcgtcgaaaaggccctcagcctcggagtgaccaagctcgtcgaacgctggatctccgtgtccggcgtcgcggacgacccaaacaactacctcttctgccgcgtccgcaagaacggggtggctgcccctagcgccaccagccaactcagcacgagggccttggaaggtattttcgaggccacccaccgcctgatctacggcgcgaaggatgacagcggtcaacgctacctcgcatggtccgggcactccgcccgcgttggagctgctagggacatggcccgcgccggtgtttccatccccgaaatcatgcaggcgggtggatggacgaacgtgaacattgtcatgaactacattcgcaaccttgacagcgagacgggcgcaatggttcgcctcctggaagatggtgactgaggtacccaacctagacttgtccatcttctggattggccaacttaattaatgtatgaaataaaaggatgcacacatagtgacatgctaatcactataatgtgggcatcaaagttgtgtgttatgtgtaattactagttatctgaataaaagagaaagagatcatccatatttcttatcctaaatgaatgtcacgtgtctttataattctttgatgaaccagatgcatttcattaaccaaatccatatacatataaatattaatcatatataattaatatcaattgggttagcaaaacaaatctagtctaggtgtgttttgcgatccgatatcgaattggccacggtaccagctgctgctgttctagggttcacaagtctgcctatttgtcttccccaatggagctatggttgtctggtctggtccttggtcgtgtcccgtttcattgtgtactatttacctgtaatgtgtatccttaagtctggtttgatggtgtctgaaacgttttgctgtggtagagcagcatggaagaactataatgaataagtgatccctaatcattgtgtccaaattttgcttctgctatacccttttgtgctgtttcttatgttttgcttaaaaatttgatctgacaaacaaatttgtctaaattatgctcttgttctgactgtgtactgtacacatttgtattgctaccggtttggcacatagttttctctttgattgcagatcaaacccttctgattgcagattgcttggctatggctgatgtgctcactgttcttctttagcttgtatattgctgatggtggcttggctacggctgaaaaagttgctgctgcgccgacttggcaactgttgctccagtaatgctttgtcctctcttcctagccgccgacttggcacttggcagctgttgctcctgtaatgcgttgttatctcttatctcttgagatgtactatgattttgaggctgtttgacttgtgccagattgccagtgctgatgctatattatctcaggtttttatgctagtatatgttttactgtgtgctgcctgtgtcgagttacgtaatctattgaaccgctatgcgtgttgatgccctgttgttgcttgccagattgatgcccctgttgcttgcagcttgcaagctgtagtgaaatcctaaaattccaaaccaaatctattctgaacttttgaagatctgtgatgtccggaagaaaagattcaaacagataaacgggactctccagaatctataaaataaatgatcgacaaacgctttgctttggtaggcttcaagcttggtcacccggtccgggcctagaaggccagcttcggccgccccgggcaactttattatacaaagttgatagataaatcagatatctggttcctaaggacccggcggaccgattaaactgattcggtccgacgcgttacctaataacttcgtatagcatacattatacgaagttattagctaactaactagtaagcgtacacctgagcggttaccgaattcctgcccttaaggccaattgttcaagattcattcaacaattgaaacatctcccatgattaaatcagtataaggttgctatggtcttgcttgacaaagtttttttttgagggaatttcaactaaatttttgagtgaaactatcaaatactgattttaaaaaatttttataaaaggaagcgcagagataaaaggccatctatgctacaaaagtacccaaaaatgtaatcctaaagtatgaattgcattttttttttgtttggacgaaaggaaaggagtattaccacaagaatgatatcatcttcatatttagatcttttttgggtaaagcttgagattctctaaatatagagaaatcagaagaaaaaaaaaccgtgttttggtggttttgatttctagcctccacaataactttgacggcgtcgacaagtctaacggacaccaagcagcgaaccaccagcgccgagccaagcgaagcagacggccgagacgttgacaccttcggcgcggcatctctcgagagttccgctccggcgctccacctccaccgctggcggtttcttattccgttccgttccgcctcctgctctgctcctctccacaccacacggcacgaaaccgttacggcaccggcagcacccagcacgggagaggggattcctttcccaccgttccttccctttccgccccgccgctataaatagccagccccatccccagcttttttccccaatctcatctcctctctcctgttgttcggagcacacgcacaatccgatcgatccccaaatccccttcgtctctcctcgcgagcctcgtggatcccagcttcaaggtacggcgatcgatcatcccccctccttctctctaccttcttttctctagactacatcggatggcgatccatggttagggcctgctagtttcccttcctgttttgtcgatggctgcgaggcacaatagatctgatggcgttatgacggctaacttgtcatgttgttgcgatttatagtccctttaggagatcagtttaatttctcggatggttcgagatcggtggtccatggttagtaccctaagatccgcgctgttagggttcgtagatggaggcgacctgttctgattgttaacttgtcagtacctgggaaatcctgggatggttctagctcgtccgcagatgagatcgatttcatgatcctctgtatcttgtttcgttgcctaggttccgtctaatctatccgtggtatgatgtagatgttttgatcgtgctaactacgtcttgtaaagttaattgtcaggtcataatttttagcatgcctttttttttgtttggttttgtctaattgggctgtcgttctagatcagagtagaagactgttccaaactacctgctggatttattgaacttggatctgtatgtgtgtcacatatcttcataaattcatgattaagatggattgaaatatcttttatctttttggtatggatagttctatatgttggtgtggctttgttagatgtatacatgcttagatacatgaagcaacgtgctgctactgtttagtaattgctgttcatttgtctaataaacagataaggatatgtatttatgttgctgttggttttgctggtactttgttggatacaaatgcttcaatacagaaaacagcatgctgctacgatttaccatttatctaatcttatcatatgtctaatctaataaacaaacatgcttttaaattatcttcatatgcttggatgatggcatacacagcggctatgtgtggttttttaaatacccagcatcatgggcatgcatgacactgctttaatatgctttttatttgcttgagactgtttcttttgtttatactgaccctttagttcggtgactcttctgcaggtcgactttaacttagcctaggatccatggcccagtccaagcacggcctgaccaaggagatgaccatgaagtaccgcatggagggctgcgtggacggccacaagttcgtgatcaccggcgagggcatcggctaccccttcaagggcaagcaggccatcaacctgtgcgtggtggagggcggccccttgcccttcgccgaggacatcttgtccgccgccttcatgtacggcaaccgcgtgttcaccgagtacccccaggacatcgtcgactacttcaagaactcctgccccgccggctacacctgggaccgctccttcctgttcgaggacggcgccgtgtgcatctgcaacgccgacatcaccgtgagcgtggaggagaactgcatgtaccacgagtccaagttctacggcgtgaacttccccgccgacggccccgtgatgaagaagatgaccgacaactgggagccctcctgcgagaagatcatccccgtgcccaagcagggcatcttgaagggcgacgtgagcatgtacctgctgctgaaggacggtggccgcttgcgctgccagttcgacaccgtgtacaaggccaagtccgtgccccgcaagatgcccgactggcacttcatccagcacaagctgacccgcgaggaccgcagcgacgccaagaaccagaagtggcacctgaccgagcacgccatcgcctccggctccgccttgccctccggactcagatctcgatagggtaccaatggccagttaacagatccagctgctgctgttctagggttcacaagtctgcctatttgtcttccccaatggagctatggttgtctggtctggtccttggtcgtgtcccgtttcattgtgtactatttacctgtaatgtgtatccttaagtctggtttgatggtgtctgaaacgttttgctgtggtagagcagcatggaagaactataatgaataagtgatccctaatcattgtgtccaaattttgcttctgctatacccttttgtgctgtttcttatgttttgcttaaaaatttgatctgacaaacaaatttgtctaaattatgctcttgttctgactgtgtactgtacacatttgtattgctaccggtttggcacatagttttctctttgattgcagatcaaacccttctgattgcagattgcttggctatggctgatgtgctcactgttcttctttagcttgtatattgctgatggtggcttggctacggctgaaaaagttgctgctgcgccgacttggcaactgttgctccagtaatgctttgtcctctcttcctagccgccgacttggcacttggcagctgttgctcctgtaatgcgttgttatctcttatctcttgagatgtactatgattttgaggctgtttgacttgtgccagattgccagtgctgatgctatattatctcaggtttttatgctagtatatgttttactgtgtgctgcctgtgtcgagttacgtaatctattgaaccgctatgcgtgttgatgccctgttgttgcttgccagattgatgcccctgttgcttgcagcttgcaagctgtagtgaaatcctaaaattcgaaaccaaatctattctgaacttttgaagatctgtgatgtccggaagaaaagattcaaacagataaacgggactctccagaatctataaaataaatgatcgacaaacgctttgctttggtaggcttcctagttagttagcggaccgaagcttcggtccgggcctgcggccgcagatatcagaacctgcgtctggacgcacaagtcatagcattatcggctaaaatttcttaatttctaaattagtcatatcggctaagaaagtggggagcactatcatttcgtagaacaagaacaaggtatcatatatatatatatatataatatttaaactttgttaagtggaatcaaagtgctagtattaatggagtttcatgtgcattaaattttatgtcacatcagcaattttgttgacttggcaaggtcatttagggtgtgtttggaagacaggggctattaggagtattaaacatagtctaattacaaaactaattgcacaaccgctaagctgaatcgcgagatggatctattaagcttaattagtccatgatttgacaatgtggtgctacaataaccatttgctaatgatggattacttaggtttaatagattcgtctcgtgatttagcctatgggttctgctattaattttgtaattagctcatatttagttcttataattagtatccgaacatccaatgtgacatgctaaagtttaaccctggtatccaaatgaagtcttatgagagtttcatcactccggtggtatatgtacttaggctccgttttcttccaccgacttatttttagcacccgtcacattgaatgtttagatactaattagaagtattaaacgtagactatttacaaaatccattacataagacgaatctaaacggcgagacgaatctattaaacctaattagtccatgatttgacaatgtgttgctacagtaaacatttgctaatgatggattaattaggcttaatagattcgtctcgccgtttagcctccacttatgtaatgggttttctaaacaatctacgtttaatactcctaattagtatctaaatattcaatgtgacacgtgctaaaaataagtcagtggaaggaagagaacgtccccttagttttccatcttattaattgtacgatgaaactgtgcagccagatgattgacaatcgcaatacttcaactagtgggccatgcacatcagcgacgtgtaacgtcgtgagttgctgttcccgtagagaaatatcaactggtgggccacgcacatcagcgtcgtgtaacgtggacggaggagccccgtgacggcgtcgacatcgaacggccaccaaccacggaaccacccgtccccacctctcggaagctccgctccacggcgtcgacatctaacggctaccagcaggcgtacgggttggagtggactccttgcctctttgcgctggcggcttccggaaattgcgtggcggagacgaggcgggctcgtctcacacggcacggaagacgtcacgggttccttccccacctctcctcttccccaccgccataaatagccgaccccctcgcctttctccccaatctcatctcgtctcgtgttgttcggagcacaccacccgccccaaatcgttcttcccgcaagcctcggcgatccttcacccgcttcaaggtacggcgatcgtcttcctcctctagatcggcgtgatctgcaagtagttgatttggtagatggttaggatctgtgcactgaagaaatcatgttagatccgcgatgtttctgttcgtagatggctgggaggtggaatttttgtgtagatctgatatgttctcctgtttatcttgtcacgctcctgcgatttgtggggattttaggtcgttgatctgggaatcgtggggttgcttctaggctgttcgtagatgaggtcgttctcacggtttactggatcattgcctagtagatcagctcgggctttcgtctttgtatatggtgcccatacttgcatctatgatctggttccgtggtgttacctaggtttctgcgcctgattcgtccgatcgattttgttagcatgtggtaaacgtttggtcatggtctgatttagattagagtcgaataggatgatctcgatctagctcttgggattaatatgcatgtgtcaccaatctgttccgtggttaagatgatgaatctatgcttagttaatgggtgtagatatatatgctgctgttcctcaatgatgccgtagcttttacctgagcagcatggatcgtcctgttacttaggtagatgcacatgcttatagatcaagatatgtactgctactgttggaattctttagtatacctgatgatcatccatgctcttgttacttgttttggtatacttggatgatggcatgctgctgctttttgttgatttgagcccatccatatctgcatatgtcacatgattaagatgattacgctgtttctgtatgatgccatagcttttatgtgagcaacatgcatcctcctggttatatgcattaatagatggaagatatctattgctacaatttgatgattattttgtacatacgatgatcaagcatgctcttcatactttgttgatatacttggataatgaaatgctgctgcacgttcattctatagcactaatgatgtgatgaacacgcacgacctgtttgtggcatctgtttgaatgtgttgttgctgttcactagagactgttttattaacctactgctagatacttacccttctgtctgtttattcttttgcagccagaatagcggatccgcccatggtcgaacaggacggcctgcatgcaggatcaccagcggcctgggtcgaaagactcttcggctacgactgggcacaacagaccatcgggtgtagcgacgcagctgttttcaggctgtccgcacagggcagacccgttttgttcgtcaaaacagacctgtctggcgcgctcaacgaactgcaagacgaggccgcaagactgagctggcttgctaccacaggcgttccttgtgctgcagtcctcgacgtcgttactgaggctggaagagactggctgctcctgggtgaagtcccaggacaggaccttttgtccagccatctggcacctgccgaaaaggtcagcatcatggcagacgccatgagaaggctgcacacactcgaccctgcaacatgccccttcgatcaccaggcaaaacacaggatcgagcgcgcaagaacgcgcatggaggctggtttggtcgaccaagatgacctcgacgaggaacaccaaggactggctcctgctgaactcttcgccagactcaaggcgagaatgccagacggtgacgacctggtcgtcacacacggcgacgcttgtctcccaaacataatggtcgagaacggacgcttcagcggtttcatcgactgcggtagactcggagtcgctgacagataccaggacatcgccctggcaacacgcgacatcgcagaggaactcggaggcgaatgggctgacaggtttctcgtgctctacggtatcgctgctccagacagccagaggatcgcattctacaggctcctcgacgagttcttttagttcgaacggtacccggggatcctctagtgccgtgggtcgtttaagctgccgctgtacctgtgtcgtctggtgccttctggtgtacctgggaggttgtcgtctatcaagtatctgtggttggtgtcatgagtcagtgagtcccaatactgttcgtgtcctgtgtgcattatacccaaaactgttatgggcaaatcatgaataagcttgatgttcgaacttaaaagtctctgctcaatatggtattatggttgtttttgttcgtctcctaatatttgcctgggatcaaattttattggctggtgttcatttgacctccatgttcttgctaggctccattttttactctacagccataatatgtttgattgtttggtttgttctttgttgtacacctggttctgtcgagcttagttttcgacactggcttacagcttaacatgttgctattttattgggttctgattgctattttattgggttctgattgctagtttttgctgaatccaaaaaccatgttatttatttaagcgatccaggttattattatgatggtggctaagtttttttttttccaagggtaaattttctggattctccagtgtttctgtggccgaattcaatcactagagtcgacctgcatgattccgatgacttcgtaggttcctagctcaagccgctcgtgtccaagcgtcacttacgattagctaatgattacggcatctaggaccgactagctagctagctaagagctcggtaccgagctcgaattcattccgattaatcgtggcctcttgctcttcaggatgaagagctatgtttaaacgtgcaagcgctactagacaattcagtacattaaaaacgtccgcaatgtgttattaagttgtctaagcgtcaatttgtttacaccacaatatatcctgcca

SEQ ID NO: 8 - DNA, 22213 bp, synthetic construct
  source 1..22213: mol_type = other DNA
gtttacccgccaatatatcctgtcaaacactgcggccgcacttgaccgcggatggagccggagctgtggtgaggccatcgacgggaggtgggggagaacacagtctcagtgttctttgtgagtccgcaaggtttttagcttttctgtattaattaaggttgctgttggctgtagaatacggtcgtggaagagctgtatcggtagctactacgtaagctattatatactggaagtctggagctcgtcgatctccggtcgtcttcctccatttctcctcgtcttgctttgactgctgctaccatttgcttctgttttctgatgaagcatgccatgtcggccaccagtgtttgtgtggtttttgcagggaatggctttcaagtgctgtgattgaatggccctcgtcgtcctcggctgagctcacatggacgcgtcatgtgagtgagatatatgatcatatgatgagtggggttcgggtgagtgcgtacttgaagtaggatcccgctttcactcattcattcattggcctttaaaccgggaaattttcgcgaggagatggagggaagcaagcagggtgacgagtgcagagtgccgcgagcgctttgtcaaaaggcaccgccgtaggcaaaaaaatcaatggccctgactgactcgatggtagtactactgtagagactagagagggttgctccccatatcttcgtgtgacttttactccagcattgcatttccgtcattgagacgttaattaatagcagctttcgggacagatgactgtggccatgtttcgtcacggccgcttcgtgccagctgggggtactatagtactgtgattttgttagtaaaaactttcattaggccaccattgacgaccgggccttcgcttttgctgcgctaattaaccatttcccggcgaccgaagggaacatgaacatgccccgacacatgagggcatgaggactagtgttctccctgtcgttcgttgacttgactagtgatagtttaaacgctcttcaactggaagagcggttactaccggttcactagctagctgctaatcgagctagttaccctatgaggtgacatgaagcgctcacggttactatgacggttagcttcacgactgttggtggcagtagcgtacgacttagctatagttccggacttacccttaagataacttcgtatagcatacattatacgaagttatgggcccacgcgtgaagagcggttaccagagctggtcacctttgtccaccaagatggaactgtcttcggccagaatggccatctggattcagcaggcctagaaggccatttatcgctatcaactttgtatagaaaagttgggccgaattcgagctcggtacggccagaatggcccggaccgaagcttgcggccgcacactgatagtttaaactgaaggcgggaaacgacaatctgatcatgagcggagaattaagggagtcacgttatgacccccgccgatgacgcgggacaagccgttttacgtttggaactgacagaaccgcaacgttgaaggagccactcagccgcgggtttctggagtttaatgagctaagcacatacgtcagaaaccattattgcgcgttcaaaagtcgcctaaggtcactatcagctagcaaatatttcttgtcaaaaatgctccactgacgttccataaattcccctcggtatccaattagagtctcatattcactctcccgggggatctcgactctagaggatcgctcaggaaggccgctgagatagaggcatggcggccaatgcgggcggcggtggagcgggaggaggcagcggcagcggcagcgtggctgcgccggcggtgtgccgccccagcggctcgcggtggacgccgacgccggagcagatcaggatgctgaaggagctctactacggctgcggcatccggtcgcccagctcggagcagatccagcgcatcaccgccatgctgcggcagcacggcaagatcgagggcaagaacgtcttctactggttccagaaccacaaggcccgcgagcgccagaagcgccgcctcaccagcctcgacgtcaacgtgcccgccgccggcgcggccgacgccaccaccagccaactcggcgtcctctcgctgtcgtcgccgccgccttcaggcgcggcgcctccctcgcccaccctcggcttctacgccgccggcaatggcggcggatcggctgtgctgctggacacgagttccgactggggcagcagcggcgctgccatggccaccgagacatgcttcctgcaggactacatgggcgtgacggacacgggcagctcgtcgcagtggccacgcttctcgtcgtcggacacgataatggcggcggccgcggcgcgggcggcgacgacgcgggcgcccgagacgctccctctcttcccgacctgcggcgacgacggcggcagcggtagcagcagctacttgccgttctggggtgccgcgtccacaactgccggcgccacttcttccgttgcgatccagcagcaacaccagctgcaggagcagtacagcttttacagcaacagcaacagcacccagctggccggcaccggcaaccaagacgtatcggcaacagcagcagcagccgccgccctggagctgagcctcagctcatggtgctccccttaccctgctgcagggagtatgtgagagcaacgcgagctgccactgctcttcactgatgtctctggaatggaaggaggaggaagtgagcatagcgttggtgcgttgctgtcaagggcgaattcacatggttaaccgacaaagcagcattagtccgttgatcggtggaagaccactcgtcagtgttgagttgaatgtttgatcaataaaatacggcaatgctgtaagggttgttttttatgccattgataatacactgtactgttcagttgttgaactctatttcttagccatgccaagtgcttttcttattttgaataacattacagcaaaaagttgaaagacaaaaaaaaaaacccccgaacagagtgctttgggtcccaagcttctttagactgtgttcggcgttccccctaaatttctccccctatatctcactcacttgtcacatcagcgttctctttccccctatatctccacgctctacagcagttccacctatatcaaacctctataccccaccacaacaatattatatactttcatcttcaactaactcatgtaccttccaatttttttctactaataattatttacgtgcacagaaacttagcaaggagagagagagcgggaatgcggccgccaccgcggtggagctcgaattccggtccgggcctagaaggccagcttcaagtttgtacaaaaaagcaggctccggccagaatctcactgactagctaaacagcggccgcatcgagcagctggcttgtggggaccagacaaaaaaggaatggtgcagaattgttaggcgcacctaccaaaagcatctttgcctttattgcaaagataaagcagattcctctagtacaagtggggaacaaaataacgtggaaaagagctgtcctgacagcccactcactaatgcgtatgacgaacgcagtgacgaccacaaaactcgagcaacgagatcatgagccaatcaaagaggagtgatgtagacctaaagcaataatggagccatgacgtaagggcttacgcccatacgaaataattaaaggctgatgtgacctgtcggtctctcagaacctttactttttatgtttggcgtgtatttttaaatttccacggcaatgacgatgtgaccgtcgacccactaaaacattgctttgtcaaaagctaaaaaagatgatgcccgacagccacttgtgtgaagcatgagaagccggtccctccactaagaaaattagtgaagcatcttccagtggtccctccactcacagctcaatcagtgagcaacaggacgaaggaaatgacgtaagccatgacgtctaatcccagggcccggtgaccaatcgaattagcttggcgcgtggaccgaagcttgcatgcctgcagtgcagcgtgacccggtcgtgcccctctctagagataatgagcattgcatgtctaagttataaaaaattaccacatattttttttgtcacacttgtttgaagtgcagtttatctatctttatacatatatttaaactttactctacgaataatataatctatagtactacaataatatcagtgttttagagaatcatataaatgaacagttagacatggtctaaaggacaattgagtattttgacaacaggactctacagttttatctttttagtgtgcatgtgttctcctttttttttgcaaatagcttcacctatataatacttcatccattttattagtacatccatttagggtttagggttaatggtttttatagactaatttttttagtacatctattttattctattttagcctctaaattaagaaaactaaaactctattttagtttttttatttaataatttagatataaaatagaataaaataaagtgactaaaaattaaacaaataccctttaagaaattaaaaaaactaaggaaacatttttcttgtttcgagtagataatgccagcctgttaaacgccgtcgacgagtctaacggacaccaaccagcgaaccagcagcgtcgcgtcgggccaagcgaagcagacggcacggcatctctgtcgctgcctctggacccctctcgagagttccgctccaccgttggacttgctccgctgtcggcatccagaaattgcgtggcggagcggcagacgtgagccggcacggcaggcggcctcctcctcctctcacggcaccggcagctacgggggattcctttcccaccgctccttcgctttcccttcctcgcccgccgtaataaatagacaccccctccacaccctctttccccaacctcgtgttgttcggagcgcacacacacacaaccagatctcccccaaatccacccgtcggcacctccgcttcaaggtacgccgctcgtcctcccccccccccctctctaccttctctagatcggcgttccggtccatgcatggttagggcccggtagttctacttctgttcatgtttgtgttagatccgtgtttgtgttagatccgtgctgctagcgttcgtacacggatgcgacctgtacgtcagacacgttctgattgctaacttgccagtgtttctctttggggaatcctgggatggctctagccgttccgcagacgggatcgatttcatgattttttttgtttcgttgcatagggtttggtttgcccttttcctttatttcaatatatgccgtgcacttgtttgtcgggtcatcttttcatgcttttttttgtcttggttgtgatgatgtggtctggttgggcggtcgttctagatcggagtagaattctgtttcaaactacctggtggatttattaattttggatctgtatgtgtgtgccatacatattcatagttacgaattgaagatgatggatggaaatatcgatctaggataggtatacatgttgatgcgggttttactgatgcatatacagagatgctttttgttcgcttggttgtgatgatgtggtgtggttgggcggtcgttcattcgttctagatcggagtagaatactgtttcaaactacctggtgtatttattaattttggaactgtatgtgtgtgtcatacatcttcatagttacgagtttaagatggatggaaatatcgatctaggataggtatacatgttgatgtgggttttactgatgcatatacatgatggcatatgcagcatctattcatatgctctaaccttgagtacctatctattataataaacaagtatgttttataattattttgatcttgatatacttggatgatggcatatgcagcagctatatgtggatttttttagcactgccttcatacgctatttatttgcttggtactgtttcttttgtcgatgctcaccctgttgtttggtgttacttctgcaggtcgactttaacttagcctaggatccatggcggagccgaagctggaggacttcctcggcggtggaggcggcagcggtggcggaggctccggaggcggtggcatcgggctgtccatgattaagaactggctgcggagccaaccggcgcccggtggtggcggctctggtggcggtggatctggtggcggtggatctgacacgttcgggcagcgcacgtcgatttaccgtggcgtgacaaggcatagatggactgggagatatgaggcacatctttgggataacagttgcagaagggaagggcaaactcgtaagggtcgtcaagtctatttaggtggctatgataaagaggagaaagctgctagggcttatgatcttgctgctctgaagtactggggtgccacaacaacaacaaattttccagtgagtaactacgaaaaggagctcgaggacatgaagcacatgacaaggcaggagtttgtagcgtctctgagaaggaagagcagtggtttctccagaggtgcatccatttacaggggagtgactaggcatcaccaacatggaagatggcaagcacggattggacgagttgcagggaacaaggatctttacttgggcaccttcagcacccaggaggaggcagcggaggcgtacgacatcgcggcgatcaagttccgcggcctcaacgccgtcaccaacttcgacatgagccgctacgacgtgaagagcatcctggacagcagcgccctccccatcggcagcgccgccaagcgcctcaaggaggccgaggccgcagcgtccgcgcagcaccaccacgccggcgtggtgagctacgacgtcggccgcatcgcctcgcagctcggcgacggcggagccctggcggcggcgtacggcgcgcactaccacggcgccgcctggccgaccatcgcgttccagccgggcgccgccagcacaggcctgtaccacccgtacgcgcagcagccaatgcgcggcggcgggtggtgcaagcaggagcaggaccacgcggtgatcgcggccgcgcacagcctgcaggacctccaccacctgaacctgggcgcggccggcgcgcacgactttttctcggcagggcagcaggccgccgccgctgcgatgcacggcctgggtagcatcgacagtgcgtcgctcgagcacagcaccggctccaactccgtcgtctacaacggcggggtcggcgacagcaacggcgccagcgccgtcggcggcagtggcggtggctacatgatgccgatgagcgctgccggagcaaccactacatcggcaatggtgagccacgagcaggtgcatgcacgggcctacgacgaagccaagcaggctgctcagatggggtacgagagctacctggtgaacgcggagaacaatggtggcggaggtggaggcggctcgggtggcggaggctccggaggcggtggctcgacgtgcgccaaggacatccaaaaagcagccgcggaggcggcactcgcctttcaggacgagacctgcgacaccaccaccaccaaccacggcctcgacatggaggagaccatggtcgaagccatctacacccccgagcagagcgagggcgccttctacatggacgaagagacaatgttcggcatgccaaccctcctcgacaacatggccgaaggcatgctgctgccgcccccgagcgtccagtggaaccacaactacgacggcgaaggcgacggggatgtgtccctgtggagctactagggtacctgacatcttatagtctgcaacctctcgtgtctgaattcctatctttatcaagtgttattgcttccacgactataggacagctttcgtcgaaagcttttgctcatgtgatctcgaaggattcatctagtctgatttttcgtgacttgtatcggttttattggattcatccaacatatatcaataaaaaatgagttgtgtttcctttcttcctagttcagttaaaattatttccctcctgcgcttgtgctgtaattgtctgtgtacctgttgtttgtgactgtgttagttcccttggatatgatttcgtatttgatatgtacatggagatagcttagcttcattattggagtatgaagttagtatgacatagtcactctcctggaaaattgacactgcaaaccatatttttattctgaaccacaaatcctagtcagtccgctggcatatgccgtccgtttgctgaatccagaacgtgggtttggagatgtacggctgagatgcctctatgcgaaggggatttcgtggtgaaacgagatgggagtagagcaacgcccgtggaagatgcttcaaacttccacacttttgagcaacgatcggcagtagtaaggtagacgatttcaagatcaaagcatatgaagataaacaacatcaacaacaaaatttgttggggttctatagagagaaacagagctacatacatacactgttttgtatctaccatctgagatgatgaaaagatgaaaaactaaagaatgccccggcgccaacgccaggacacgccgcgcgcgcgtcacccgagccatctcttgacccagccggcgctgtatatttacacacgttgcagcatcgatcaccacctgttcgatcgcgtcgccgtcaccggcgcgccgcgacttattgaactagtctagggcgcggctaacaacctagcttagattgccttgtctaaacccttaggctaacgcgccactctagaaggccgatctcccccgaacgcgccagatccgatatcgatgggccctggccgaagcttggtcacccggtccgggcctagaaggccgatctcccgggcacccagctttcttgtacaaagtggccgttaacggatcggccagaatggcccggaccgggttaccccgcggttcaaagccaatgactgttgttaggtccagtttctaaggacgaatcatccaatcactggttctttctgaacaaaacaaagagctatagagttacgttactgtagccgagacagagcctgcaatctggttatgccacatactaggttctttcttaaagttgactcactctatcctaagttctacttacaaggagctacaacaaattggtcataaccggagagcgttcaaggaggtaatatcccatcttactctgtagcaaggctacaaaaggagagctaaagaactaggctacaaaaagagagctaaagaactaactatctagcaagactacagagctatagtgtagagatttcataaccggtgagcgttcaaggatactttgaagagaagaggtaatatctcaactagcaagactacaaaaaaatggagatataaaactaactgtctaacaagactacagagctatagtagagatagatacgttcgacacttaagcatgagaattcgagctcggtaccctggttcacaaactcaatacaacacacagtggagtagggtattacgctccggcggcccgaaccactctaaatccttgtgtcctcgtgtgctcttccaccattaatgactgtaattgcagggacacgaagagttgtagcgcttttgccaacaagatccgctatatgctagtagagtggaacctgcacagcaacaagcatccaataatctgagaataagaattatgtgtggtgatggttctcatctctgcaactcgccattttcgcgagagaaccaaatccaagttggtgaagatcatgatttgggctcatgggctggcatagtagctattacctttgcaattgtggttcgaatctatccgatattctccttttcagggagagctaatgcttatgcttattgggtattttggtttgacactgcttcacgcccaaaaaaaggcaactatgtctgagttggatatggcccaaaaaaaggcagctatgtctgagttggatatggaagtcttctttcgtttagggtgaagtaagaccaagctcatgagcttattatcttaggtcggaacaaattagttgataggcatggcacatttatcaaattataatgattttaacagaaaagcaacacctctttttcagcagcaccagctttgcaagctgcaattgacactccaagcatagtatttgctccaaactcagcctgcatttcgcacaatatcatatctatttccatttggataaaatatattttccagaaatatgggaacagaatcaagatacagaaaaaagttgtggtagtagtggtaagtggaaacacaagtacagtgaaaagatagcattatttctgaacagtcaaattaaccgaaataagtagtatcacatactgcccctaaattgactacacccaatgtaaagaattgcttgagcatattgagccatcagttgtttgtttgtgtaacggatttgacaatgcagagttcaggagcaaaaaaccgcaaaggagagaaagagggaaaggatctcctagtatcccaccttgtggcgcgccctgtcaagtgcatgatggcctggtcgatctgcgtctgctgctgcggttccatcccaacgagtgcctccgacaccttgtcgttgatcacccgcaccgcgtaggcgacccccctggcgaggaacttccgcctctcggaggccccggccgcgtcggcggcggcgccctcgagcgcgcccacgctagccgtagatgctcggtgcacggccttgttggtgtgcaactcgacctcaacggccggtgcgctacgcccgtcaaggatctggcgcgcccgcaccctcgtgatcacggtgggcgcctcccgcctcatgtggccgacgatgaaaagcgccgggttaggggccttggcgcgcaccgccgtattcagggcctcctcgctcttgcgcgagagcaggtgcttccccaggtactcctgcactgacaaggctgccacagcggtggaatttgtcctcacgacttcgccacgtcgtcctcacctccctggcttcccacgactccgccgtatcgaggtgctcggtgggtcgtcttaatccgaagtccgaactaggaagacgagacagagaggtctgaggaatgggcctcgtttgatgttgagctgaattatttttccagcataagcccaggtcttggtccatgaacaaaattactagaaacccagcccagtactacgatctaaaagagggactgccactggatagctctctctagcattctccacgctccaatacagcggcgtcgtgtctatccgggtctatccgcgaacacgtgagaactctccagaaactgctttctcctccacttcatctctctcgctttccctctataaaaagaccccttctaggaattgagggagacagcaagcaccaagcagcgatccgaagctcaatcaattcactcaaacctcttccccaaatcttcgattagatcttcgttgacaagaagactagaaccgaacctgacatgtccaacctgctcacggttcaccagaaccttccggctcttccagtggacgcgacgtccgatgaagtcaggaagaacctcatggacatgttccgcgacaggcaagcgttcagcgagcacacctggaagatgctgctctccgtctgccgctcctgggctgcatggtgcaagctgaacaacaggaagtggttccccgctgagcccgaggacgtgagggattaccttctgtacctgcaagcgcgaggtttgtttctgcttctacctttgatatatatataataattatcattaattagtagtaatataatatttcaaatatttttttcaaaataaaagaatgtagtatatagcaattgcttttctgtagtttataagtgtgtatattttaatttataacttttctaatatatgaccaaaacatggtgatgcctaggtctggcagtgaagaccatccagcaacaccttggacaactgaacatgcttcacaggcgctccggcctcccgcgccccagcgactcgaacgccgtgagcctcgtcatgcgccgcatcaggaaggaaaacgtcgatgccggcgaaagggcaaagcaggccctcgcgttcgagaggaccgatttcgaccaggtccgcagcctgatggagaacagcgacaggtgccaggacattaggaacctggcgttcctcggaattgcatacaacacgctcctcaggatcgcggaaattgcccgcattcgcgtgaaggacattagccgcaccgacggcggcaggatgcttatccacattggcaggaccaagacgctcgtttccaccgcaggcgtcgaaaaggccctcagcctcggagtgaccaagctcgtcgaacgctggatctccgtgtccggcgtcgcggacgacccaaacaactacctcttctgccgcgtccgcaagaacggggtggctgcccctagcgccaccagccaactcagcacgagggccttggaaggtattttcgaggccacccaccgcctgatctacggcgcgaaggatgacagcggtcaacgctacctcgcatggtccgggcactccgcccgcgttggagctgctagggacatggcccgcgccggtgtttccatccccgaaatcatgcaggcgggtggatggacgaacgtgaacattgtcatgaactacattcgcaaccttgacagcgagacgggcgcaatggttcgcctcctggaagatggtgactgaggtacccaacctagacttgtccatcttctggattggccaacttaattaatgtatgaaataaaaggatgcacacatagtgacatgctaatcactataatgtgggcatcaaagttgtgtgttatgtgtaattactagttatctgaataaaagagaaagagatcatccatatttcttatcctaaatgaatgtcacgtgtctttataattctttgatgaaccagatgcatttcattaaccaaatccatatacatataaatattaatcatatataattaatatcaattgggttagcaaaacaaatctagtctaggtgtgttttgcgatccgatatcgaattggccacggtaccagctgctgctgttctagggttcacaagtctgcctatttgtcttccccaatggagctatggttgtctggtctggtccttggtcgtgtcccgtttcattgtgtactatttacctgtaatgtgtatccttaagtctggtttgatggtgtctgaaacgttttgctgtggtagagcagcatggaagaactataatgaataagtgatccctaatcattgtgtccaaattttgcttctgctatacccttttgtgctgtttcttatgttttgcttaaaaatttgatctgacaaacaaatttgtctaaattatgctcttgttctgactgtgtactgtacacatttgtattgctaccggtttggcacatagttttctctttgattgcagatcaaacccttctgattgcagattgcttggctatggctgatgtgctcactgttcttctttagcttgtatattgctgatggtggcttggctacggctgaaaaagttgctgctgcgccgacttggcaactgttgctccagtaatgctttgtcctctcttcctagccgccgacttggcacttggcagctgttgctcctgtaatgcgttgttatctcttatctcttgagatgtactatgattttgaggctgtttgacttgtgccagattgccagtgctgatgctatattatctcaggtttttatgctagtatatgttttactgtgtgctgcctgtgtcgagttacgtaatctattgaaccgctatgcgtgttgatgccctgttgttgcttgccagattgatgcccctgttgcttgcagcttgcaagctgtagtgaaatcctaaaattccaaaccaaatctattctgaacttttgaagatctgtgatgtccggaagaaaagattcaaacagataaacgggactctccagaatctataaaataaatgatcgacaaacgctttgctttggtaggcttcaagcttggtcacccggtccgggcctagaaggccagcttcggccgccccgggcaactttattatacaaagttgatagataaatcagatatctggttcctaaggacccggcggaccgattaaactgattcggtccgacgcgttacctaataacttcgtatagcatacattatacgaagttattagctaactaactagtaagcgtacacctgagcggttaccgaattcctgcccttaaggccaattgttcaagattcattcaacaattgaaacatctcccatgattaaatcagtataaggttgctatggtcttgcttgacaaagtttttttttgagggaatttcaactaaatttttgagtgaaactatcaaatactgattttaaaaaatttttataaaaggaagcgcagagataaaaggccatctatgctacaaaagtacccaaaaatgtaatcctaaagtatgaattgcattttttttttgtttggacgaaaggaaaggagtattaccacaagaatgatatcatcttcatatttagatcttttttgggtaaagcttgagattctctaaatatagagaaatcagaagaaaaaaaaaccgtgttttggtggttttgatttctagcctccacaataactttgacggcgtcgacaagtctaacggacaccaagcagcgaaccaccagcgccgagccaagcgaagcagacggccgagacgttgacaccttcggcgcggcatctctcgagagttccgctccggcgctccacctccaccgctggcggtttcttattccgttccgttccgcctcctgctctgctcctctccacaccacacggcacgaaaccgttacggcaccggcagcacccagcacgggagaggggattcctttcccaccgttccttccctttccgccccgccgctataaatagccagccccatccccagcttttttccccaatctcatctcctctctcctgttgttcggagcacacgcacaatccgatcgatccccaaatccccttcgtctctcctcgcgagcctcgtggatcccagcttcaaggtacggcgatcgatcatcccccctccttctctctaccttcttttctctagactacatcggatggcgatccatggttagggcctgctagtttcccttcctgttttgtcgatggctgcgaggcacaatagatctgatggcgttatgacggctaacttgtcatgttgttgcgatttatagtccctttaggagatcagtttaatttctcggatggttcgagatcggtggtccatggttagtaccctaagatccgcgctgttagggttcgtagatggaggcgacctgttctgattgttaacttgtcagtacctgggaaatcctgggatggttctagctcgtccgcagatgagatcgatttcatgatcctctgtatcttgtttcgttgcctaggttccgtctaatctatccgtggtatgatgtagatgttttgatcgtgctaactacgtcttgtaaagttaattgtcaggtcataatttttagcatgcctttttttttgtttggttttgtctaattgggctgtcgttctagatcagagtagaagactgttccaaactacctgctggatttattgaacttggatctgtatgtgtgtcacatatcttcataaattcatgattaagatggattgaaatatcttttatctttttggtatggatagttctatatgttggtgtggctttgttagatgtatacatgcttagatacatgaagcaacgtgctgctactgtttagtaattgctgttcatttgtctaataaacagataaggatatgtatttatgttgctgttggttttgctggtactttgttggatacaaatgcttcaatacagaaaacagcatgctgctacgatttaccatttatctaatcttatcatatgtctaatctaataaacaaacatgcttttaaattatcttcatatgcttggatgatggcatacacagcggctatgtgtggttttttaaatacccagcatcatgggcatgcatgacactgctttaatatgctttttatttgcttgagactgtttcttttgtttatactgaccctttagttcggtgactcttctgcaggtcgactttaacttagcctaggatccatggcccagtccaagcacggcctgaccaaggagatgaccatgaagtaccgcatggagggctgcgtggacggccacaagttcgtgatcaccggcgagggcatcggctaccccttcaagggcaagcaggccatcaacctgtgcgtggtggagggcggccccttgcccttcgccgaggacatcttgtccgccgccttcatgtacggcaaccgcgtgttcaccgagtacccccaggacatcgtcgactacttcaagaactcctgccccgccggctacacctgggaccgctccttcctgttcgaggacggcgccgtgtgcatctgcaacgccgacatcaccgtgagcgtggaggagaactgcatgtaccacgagtccaagttctacggcgtgaacttccccgccgacggccccgtgatgaagaagatgaccgacaactgggagccctcctgcgagaagatcatccccgtgcccaagcagggcatcttgaagggcgacgtgagcatgtacctgctgctgaaggacggtggccgcttgcgctgccagttcgacaccgtgtacaaggccaagtccgtgccccgcaagatgcccgactggcacttcatccagcacaagctgacccgcgaggaccgcagcgacgccaagaaccagaagtggcacctgaccgagcacgccatcgcctccggctccgccttgccctccggactcagatctcgatagggtaccaatggccagttaacagatccagctgctgctgttctagggttcacaagtctgcctatttgtcttccccaatggagctatggttgtctggtctggtccttggtcgtgtcccgtttcattgtgtactatttacctgtaatgtgtatccttaagtctggtttgatggtgtctgaaacgttttgctgtggtagagcagcatggaagaactataatgaataagtgatccctaatcattgtgtccaaattttgcttctgctatacccttttgtgctgtttcttatgttttgcttaaaaatttgatctgacaaacaaatttgtctaaattatgctcttgttctgactgtgtactgtacacatttgtattgctaccggtttggcacatagttttctctttgattgcagatcaaacccttctgattgcagattgcttggctatggctgatgtgctcactgttcttctttagcttgtatattgctgatggtggcttggctacggctgaaaaagttgctgctgcgccgacttggcaactgttgctccagtaatgctttgtcctctcttcctagccgccgacttggcacttggcagctgttgctcctgtaatgcgttgttatctcttatctcttgagatgtactatgattttgaggctgtttgacttgtgccagattgccagtgctgatgctatattatctcaggtttttatgctagtatatgttttactgtgtgctgcctgtgtcgagttacgtaatctattgaaccgctatgcgtgttgatgccctgttgttgcttgccagattgatgcccctgttgcttgcagcttgcaagctgtagtgaaatcctaaaattcgaaaccaaatctattctgaacttttgaagatctgtgatgtccggaagaaaagattcaaacagataaacgggactctccagaatctataaaataaatgatcgacaaacgctttgctttggtaggcttcctagttagttagcggaccgaagcttcggtccgggcctgcggccgcagatatcagaacctgcgtctggacgcacaagtcatagcattatcggctaaaatttcttaatttctaaattagtcatatcggctaagaaagtggggagcactatcatttcgtagaacaagaacaaggtatcatatatatatatatatataatatttaaactttgttaagtggaatcaaagtgctagtattaatggagtttcatgtgcattaaattttatgtcacatcagcaattttgttgacttggcaaggtcatttagggtgtgtttggaagacaggggctattaggagtattaaacatagtctaattacaaaactaattgcacaaccgctaagctgaatcgcgagatggatctattaagcttaattagtccatgatttgacaatgtggtgctacaataaccatttgctaatgatggattacttaggtttaatagattcgtctcgtgatttagcctatgggttctgctattaattttgtaattagctcatatttagttcttataattagtatccgaacatccaatgtgacatgctaaagtttaaccctggtatccaaatgaagtcttatgagagtttcatcactccggtggtatatgtacttaggctccgttttcttccaccgacttatttttagcacccgtcacattgaatgtttagatactaattagaagtattaaacgtagactatttacaaaatccattacataagacgaatctaaacggcgagacgaatctattaaacctaattagtccatgatttgacaatgtgttgctacagtaaacatttgctaatgatggattaattaggcttaatagattcgtctcgccgtttagcctccacttatgtaatgggttttctaaacaatctacgtttaatactcctaattagtatctaaatattcaatgtgacacgtgctaaaaataagtcagtggaaggaagagaacgtccccttagttttccatcttattaattgtacgatgaaactgtgcagccagatgattgacaatcgcaatacttcaactagtgggccatgcacatcagcgacgtgtaacgtcgtgagttgctgttcccgtagagaaatatcaactggtgggccacgcacatcagcgtcgtgtaacgtggacggaggagccccgtgacggcgtcgacatcgaacggccaccaaccacggaaccacccgtccccacctctcggaagctccgctccacggcgtcgacatctaacggctaccagcaggcgtacgggttggagtggactccttgcctctttgcgctggcggcttccggaaattgcgtggcggagacgaggcgggctcgtctcacacggcacggaagacgtcacgggttccttccccacctctcctcttccccaccgccataaatagccgaccccctcgcctttctccccaatctcatctcgtctcgtgttgttcggagcacaccacccgccccaaatcgttcttcccgcaagcctcggcgatccttcacccgcttcaaggtacggcgatcgtcttcctcctctagatcggcgtgatctgcaagtagttgatttggtagatggttaggatctgtgcactgaagaaatcatgttagatccgcgatgtttctgttcgtagatggctgggaggtggaatttttgtgtagatctgatatgttctcctgtttatcttgtcacgctcctgcgatttgtggggattttaggtcgttgatctgggaatcgtggggttgcttctaggctgttcgtagatgaggtcgttctcacggtttactggatcattgcctagtagatcagctcgggctttcgtctttgtatatggtgcccatacttgcatctatgatctggttccgtggtgttacctaggtttctgcgcctgattcgtccgatcgattttgttagcatgtggtaaacgtttggtcatggtctgatttagattagagtcgaataggatgatctcgatctagctcttgggattaatatgcatgtgtcaccaatctgttccgtggttaagatgatgaatctatgcttagttaatgggtgtagatatatatgctgctgttcctcaatgatgccgtagcttttacctgagcagcatggatcgtcctgttacttaggtagatgcacatgcttatagatcaagatatgtactgctactgttggaattctttagtatacctgatgatcatccatgctcttgttacttgttttggtatacttggatgatggcatgctgctgctttttgttgatttgagcccatccatatctgcatatgtcacatgattaagatgattacgctgtttctgtatgatgccatagcttttatgtgagcaacatgcatcctcctggttatatgcattaatagatggaagatatctattgctacaatttgatgattattttgtacatacgatgatcaagcatgctcttcatactttgttgatatacttggataatgaaatgctgctgcacgttcattctatagcactaatgatgtgatgaacacgcacgacctgtttgtggcatctgtttgaatgtgttgttgctgttcactagagactgttttattaacctactgctagatacttacccttctgtctgtttattcttttgcagccagaatagcggatccgcccatggtcgaacaggacggcctgcatgcaggatcaccagcggcctgggtcgaaagactcttcggctacgactgggcacaacagaccatcgggtgtagcgacgcagctgttttcaggctgtccgcacagggcagacccgttttgttcgtcaaaacagacctgtctggcgcgctcaacgaactgcaagacgaggccgcaagactgagctggcttgctaccacaggcgttccttgtgctgcagtcctcgacgtcgttactgaggctggaagagactggctgctcctgggtgaagtcccaggacaggaccttttgtccagccatctggcacctgccgaaaaggtcagcatcatggcagacgccatgagaaggctgcacacactcgaccctgcaacatgccccttcgatcaccaggcaaaacacaggatcgagcgcgcaagaacgcgcatggaggctggtttggtcgaccaagatgacctcgacgaggaacaccaaggactggctcctgctgaactcttcgccagactcaaggcgagaatgccagacggtgacgacctggtcgtcacacacggcgacgcttgtctcccaaacataatggtcgagaacggacgcttcagcggtttcatcgactgcggtagactcggagtcgctgacagataccaggacatcgccctggcaacacgcgacatcgcagaggaactcggaggcgaatgggctgacaggtttctcgtgctctacggtatcgctgctccagacagccagaggatcgcattctacaggctcctcgacgagttcttttagttcgaacggtacccggggatcctctagtgccgtgggtcgtttaagctgccgctgtacctgtgtcgtctggtgccttctggtgtacctgggaggttgtcgtctatcaagtatctgtggttggtgtcatgagtcagtgagtcccaatactgttcgtgtcctgtgtgcattatacccaaaactgttatgggcaaatcatgaataagcttgatgttcgaacttaaaagtctctgctcaatatggtattatggttgtttttgttcgtctcctaatatttgcctgggatcaaattttattggctggtgttcatttgacctccatgttcttgctaggctccattttttactctacagccataatatgtttgattgtttggtttgttctttgttgtacacctggttctgtcgagcttagttttcgacactggcttacagcttaacatgttgctattttattgggttctgattgctattttattgggttctgattgctagtttttgctgaatccaaaaaccatgttatttatttaagcgatccaggttattattatgatggtggctaagtttttttttttccaagggtaaattttctggattctccagtgtttctgtggccgaattcaatcactagagtcgacctgcatgattccgatgacttcgtaggttcctagctcaagccgctcgtgtccaagcgtcacttacgattagctaatgattacggcatctaggaccgactagctagctagctaagagctcggtaccgagctcgaattcattccgattaatcgtggcctcttgctcttcaggatgaagagctatgtttaaacgtgcaagcgctactagacaattcagtacattaaaaacgtccgcaatgtgttattaagttgtctaagcgtcaatttgtttacaccacaatatatcctgcca

SEQ ID NO: 9 - DNA, 25561 bp, synthetic construct
  source 1..25561: mol_type = other DNA
gtttacccgccaatatatcctgtcaaacactgcggccgcacttgaccgcggatggagccggagctgtggtgaggccatcgacgggaggtgggggagaacacagtctcagtgttctttgtgagtccgcaaggtttttagcttttctgtattaattaaggttgctgttggctgtagaatacggtcgtggaagagctgtatcggtagctactacgtaagctattatatactggaagtctggagctcgtcgatctccggtcgtcttcctccatttctcctcgtcttgctttgactgctgctaccatttgcttctgttttctgatgaagcatgccatgtcggccaccagtgtttgtgtggtttttgcagggaatggctttcaagtgctgtgattgaatggccctcgtcgtcctcggctgagctcacatggacgcgtcatgtgagtgagatatatgatcatatgatgagtggggttcgggtgagtgcgtacttgaagtaggatcccgctttcactcattcattcattggcctttaaaccgggaaattttcgcgaggagatggagggaagcaagcagggtgacgagtgcagagtgccgcgagcgctttgtcaaaaggcaccgccgtaggcaaaaaaatcaatggccctgactgactcgatggtagtactactgtagagactagagagggttgctccccatatcttcgtgtgacttttactccagcattgcatttccgtcattgagacgttaattaatagcagctttcgggacagatgactgtggccatgtttcgtcacggccgcttcgtgccagctgggggtactatagtactgtgattttgttagtaaaaactttcattaggccaccattgacgaccgggccttcgcttttgctgcgctaattaaccatttcccggcgaccgaagggaacatgaacatgccccgacacatgagggcatgaggactagtgttctccctgtcgttcgttgacttgactagtgatagtttaaacgctcttcaactggaagagcggttactaccggttcactagctagctgctaatcgagctagttaccctatgaggtgacatgaagcgctcacggttactatgacggttagcttcacgactgttggtggcagtagcgtacgacttagctatagttccggacttacccttaagataacttcgtatagcatacattatacgaagttatgggcccacgcgtgaagagcggttaccagagctggtcacctttgtccaccaagatggaactgtcttcggccagaatggccatctggattcagcaggcctagaaggccatttatcgctatcaactttgtatagaaaagttgggccgaattcgagctcggtacggccagaatggcccggaccgaagcttgcatgcctgcagcccatccctcagccgcctttcactatcttttttgcccgagtcattgtcatgtgaaccttggcatgtataatcggtgaattgcgtcgattttcctcttataggtgggccaatgaatccgtgtgatcgcgtctgattggctagagatatgtttcttccttgttggatgtattttcatacataatcatatgcatacaaatatttcattacactttatagaaatggtcagtaataaaccctatcactatgtctggtgtttcattttatttgcttttaaacgaaaattgacttcctgattcaatatttaaggatcgtcaacggtgtgcagttactaaattctggtttgtaggaactatagtaaactattcaagtcttcacttattgtgcactcacctctcgccacatcaccacagatgttattcacgtcttaaatttgaactacacatcatattgacacaatattttttttaaataagcgattaaaacctagcctctatgtcaacaatggtgtacataaccagcgaagtttagggagtaaaaaacatcgccttacacaaagttcgctttaaaaaataaagagtaaattttactttggaccacccttcaaccaatgtttcactttagaacgagtaattttattattgtcactttggaccaccctcaaatcttttttccatctacatccaatttatcatgtcaaagaaatggtctacatacagctaaggagatttatcgacgaatagtagctagcatactcgaggtcattcatatgcttgagaagagagtcgggatagtccaaaataaaacaaaggtaagattacctggtcaaaagtgaaaacatcagttaaaaggtggtataaagtaaaatatcggtaataaaaggtggcccaaagtgaaatttactcttttctactattataaaaattgaggatgtttttgtcggtactttgatacgtcatttttgtatgaattggtttttaagtttattcgcttttggaaatgcatatctgtatttgagtcgggttttaagttcgtttgcttttgtaaatacagagggatttgtataagaaatatctttaaaaaaacccatatgctaatttgacataatttttgagaaaaatatatattcaggcgaattctcacaatgaacaataataagattaaaatagctttcccccgttgcagcgcatgggtattttttctagtaaaaataaaagataaacttagactcaaaacatttacaaaaacaacccctaaagttcctaaagcccaaagtgctatccacgatccatagcaagcccagcccaacccaacccaacccaacccaccccagtccagccaactggacaatagtctccacacccccccactatcaccgtgagttgtccgcacgcaccgcacgtctcgcagccaaaaaaaaaaaaagaaagaaaaaaaagaaaaagaaaaaacagcaggtgggtccgggtcgtgggggccggaaacgcgaggaggatcgcgagccagcgacgaggccggccctccctccgcttccaaagaaacgccccccatcgccactatatacatacccccccctctcctcccatccccccaaccctaccaccaccaccaccaccacctccacctcctcccccctcgctgccggacgacgagctcctcccccctccccctccgccgccgccgcgccggtaaccaccccgcccctctcctctttctttctccgttttttttttccgtcacggtctcgatctttggccttggtagtttgggtgggcgagaggcggcttcgtgcgcgcccagatcggtgcgcgggaggggcgggatctcgcggctggggctctcgccggcgtggatcaggcccggatctcgcggggaatggggctctcggatgtagatctgcgatccgccgttgttgggggagatgatggggggtttaaaatttccgccatgctaaacaagatcaggaagaggggaaaagggcactatggtttatatttttatatatttctgctgcttcgtcaggcttagatgtgctagatctttctttcttctttttgtgggtagaatttgaatccctcagcattgttcatcggtagtttttcttttcatgatttgtgacaaatgcagcctcgtgcggagcttttttgtaggtagaaggatccgcccatggcggccaatgcgggcggcggtggagcgggaggaggcagcggcagcggcagcgtggctgcgccggcggtgtgccgccccagcggctcgcggtggacgccgacgccggagcagatcaggatgctgaaggagctctactacggctgcggcatccggtcgcccagctcggagcagatccagcgcatcaccgccatgctgcggcagcacggcaagatcgagggcaagaacgtcttctactggttccagaaccacaaggcccgcgagcgccagaagcgccgcctcaccagcctcgacgtcaacgtgcccgccgccggcgcggccgacgccaccaccagccaactcggcgtcctctcgctgtcgtcgccgccgccttcaggcgcggcgcctccctcgcccaccctcggcttctacgccgccggcaatggcggcggatcggctgtgctgctggacacgagttccgactggggcagcagcggcgctgctatggccaccgagacatgcttcctgcaggactacatgggcgtgacggacacgggcagctcgtcgcagtggccacgcttctcgtcgtcggacacgataatggcggcggccgcggcgcgggcggcgacgacgcgggcgcccgagacgctccctctcttcccgacctgcggcgacgacggcggcagcggtagcagcagctacttgccgttctggggtgccgcgtccacaactgccggcgccacttcttccgttgcgatccaacagcaacaccagctgcaggagcagtacagcttttacagcaacagcaacagcacccagctggccggcaccggcaaccaagacgtatcggcaacagcagcagcagccgccgccctggagctgagcctcagctcatggtgctccccttaccctgctgcagggagtatgtgagagcaacgcgagctgccactgctcttcactgatgtctctggaatggaaggaggaggaagtgagaacagatcattcgacaaagcagcattagtccgttgatcggtggaagaccactcgtcagtgttgagttgaatgtttgatcaataaaatacggcaatgctgtaagggttgttttttatgccattgataatacactgtactgttcagttgttgaactctatttcttagccatgccaagtgcttttcttattttgaataacattacagcaaaaagttgaaagacaaaaaaaaaaacccccgaacagagtgctttgggtcccaagcttctttagactgtgttcggcgttccccctaaatttctccccctatatctcactcacttgtcacatcagcgttctctttccccctatatctccacgctctacagcagttccacctatatcaaacctctataccccaccacaacaatattatatactttcatcttcaactaactcatgtaccttccaatttttttctactaataattatttacgtgcacagaaacttagcaaggagagagagagcgggaatttaaatgctcggcgttaggcttttagtccgctaggtggctagaccgaggttaggacgctagttcactaggggcctagtggtgttttaagacgtcacggtcacctgaagaaactatgtgctgtagtatagccgctgcccgctggctagctagctagttgagtcatttagcggcgatgattgagtaataatgtgtcacgcatcaccatgcatgggtggcagtgtcagtgtgagcaatgacctgaatgaacaattgaaatgaaaagaaaaaagtattgttccaaattaaacgttttaaccttttaataggtttatacaataattgatatatgttttctgtatatgtctaatttgttatcatccatttagatatagacaaaaaaaatctaagaactaaaacaaatgctaatttgaaatgaagggagtatatattgggataatgtcgatgagatccctcgtaatatcaccgacatcacacgtgtccagttaatgtatcagtgatacgtgtattcacatttgttgcgcgtaggcgtacccaacaattttgatcgactatcagaaagtcaacggaagcgagtcgacctcgagggggggccccggccgaagcttcggccggggcccatcgataacgagtatcggtccccattgacacatctactcctaacgctaacaacattcttcacttctagtgtatggcatcgacaattggtactttaatcttgggtcttcacttttacaactaaacaacccaaatataaatattatttgagtgggtttggtgttcatcagaacattcccatctttggtaatgctacctagcataaaagtgagctatcacgttgggcagcccattccatgcaatttttaccttcctcaaaaaaaatctttgatatatttatggtataataatttaaacttcacattgatcataattttttcagcaaataagttccataatttggtgtttgcaatatcgaaattgttactcatagggtccagttgatttaatgacattagtgttgttaagttcacatgcttcaaagaattctacatgtctacaatgctgcatttgtctgtaaaatttgggttcttgtaaaaaatacatgtgttgaatatttaccaaaaaaatataatgcgatatgactttgtgtgagcatgtttggacacagttacaagtttacttctaaacttatattatgttttgcttcgtgcaagtacaagtgatttgaatatccaaggccaaagcatgtgtccatcactatatcaaatcaacataccatatatgtatatactcaacaaaaagcacaaataatcacatctatgttataaacacacccccacacaaccaaacattaacattcaataggttgtgctaggacatcattgggatgatgaagtaatattgtattatctatgtattgaccaagcatgagtttaaaattacgatttgatgttttcagttatttatatgatgaacatagttcagaaatatatcgagataaatctcaatcaatatattgattatttctaggaaacacatgccggtatgagggcaccattgtcgagtacatcttaagtgagttaacggatcctctagagtcgacctgcaggcatgcccgcggatatcgatgggccccggccgaagcttcaagtttgtacaaaaaagcaggctccggccagaatctcactgactagctaaacagcggccgcatcgagcagctggcttgtggggaccagacaaaaaaggaatggtgcagaattgttaggcgcacctaccaaaagcatctttgcctttattgcaaagataaagcagattcctctagtacaagtggggaacaaaataacgtggaaaagagctgtcctgacagcccactcactaatgcgtatgacgaacgcagtgacgaccacaaaactcgagcaacgagatcatgagccaatcaaagaggagtgatgtagacctaaagcaataatggagccatgacgtaagggcttacgcccatacgaaataattaaaggctgatgtgacctgtcggtctctcagaacctttactttttatgtttggcgtgtatttttaaatttccacggcaatgacgatgtgaccgtcgacccactaaaacattgctttgtcaaaagctaaaaaagatgatgcccgacagccacttgtgtgaagcatgagaagccggtccctccactaagaaaattagtgaagcatcttccagtggtccctccactcacagctcaatcagtgagcaacaggacgaaggaaatgacgtaagccatgacgtctaatcccagggcccggtgaccaatcgaattagcttggcgcgtggaccgaagcttgcatgcctgcagtgcagcgtgacccggtcgtgcccctctctagagataatgagcattgcatgtctaagttataaaaaattaccacatattttttttgtcacacttgtttgaagtgcagtttatctatctttatacatatatttaaactttactctacgaataatataatctatagtactacaataatatcagtgttttagagaatcatataaatgaacagttagacatggtctaaaggacaattgagtattttgacaacaggactctacagttttatctttttagtgtgcatgtgttctcctttttttttgcaaatagcttcacctatataatacttcatccattttattagtacatccatttagggtttagggttaatggtttttatagactaatttttttagtacatctattttattctattttagcctctaaattaagaaaactaaaactctattttagtttttttatttaataatttagatataaaatagaataaaataaagtgactaaaaattaaacaaataccctttaagaaattaaaaaaactaaggaaacatttttcttgtttcgagtagataatgccagcctgttaaacgccgtcgacgagtctaacggacaccaaccagcgaaccagcagcgtcgcgtcgggccaagcgaagcagacggcacggcatctctgtcgctgcctctggacccctctcgagagttccgctccaccgttggacttgctccgctgtcggcatccagaaattgcgtggcggagcggcagacgtgagccggcacggcaggcggcctcctcctcctctcacggcaccggcagctacgggggattcctttcccaccgctccttcgctttcccttcctcgcccgccgtaataaatagacaccccctccacaccctctttccccaacctcgtgttgttcggagcgcacacacacacaaccagatctcccccaaatccacccgtcggcacctccgcttcaaggtacgccgctcgtcctcccccccccccctctctaccttctctagatcggcgttccggtccatgcatggttagggcccggtagttctacttctgttcatgtttgtgttagatccgtgtttgtgttagatccgtgctgctagcgttcgtacacggatgcgacctgtacgtcagacacgttctgattgctaacttgccagtgtttctctttggggaatcctgggatggctctagccgttccgcagacgggatcgatttcatgattttttttgtttcgttgcatagggtttggtttgcccttttcctttatttcaatatatgccgtgcacttgtttgtcgggtcatcttttcatgcttttttttgtcttggttgtgatgatgtggtctggttgggcggtcgttctagatcggagtagaattctgtttcaaactacctggtggatttattaattttggatctgtatgtgtgtgccatacatattcatagttacgaattgaagatgatggatggaaatatcgatctaggataggtatacatgttgatgcgggttttactgatgcatatacagagatgctttttgttcgcttggttgtgatgatgtggtgtggttgggcggtcgttcattcgttctagatcggagtagaatactgtttcaaactacctggtgtatttattaattttggaactgtatgtgtgtgtcatacatcttcatagttacgagtttaagatggatggaaatatcgatctaggataggtatacatgttgatgtgggttttactgatgcatatacatgatggcatatgcagcatctattcatatgctctaaccttgagtacctatctattataataaacaagtatgttttataattattttgatcttgatatacttggatgatggcatatgcagcagctatatgtggatttttttagcactgccttcatacgctatttatttgcttggtactgtttcttttgtcgatgctcaccctgttgtttggtgttacttctgcaggtcgactttaacttagcctaggatccatggcggagccgaagctggaggacttcctcggcggtggaggcggcagcggtggcggaggctccggaggcggtggcatcgggctgtccatgattaagaactggctgcggagccaaccggcgcccggtggtggcggctctggtggcggtggatctggtggcggtggatctgacacgttcgggcagcgcacgtcgatttaccgtggcgtgacaaggcatagatggactgggagatatgaggcacatctttgggataacagttgcagaagggaagggcaaactcgtaagggtcgtcaagtctatttaggtggctatgataaagaggagaaagctgctagggcttatgatcttgctgctctgaagtactggggtgccacaacaacaacaaattttccagtgagtaactacgaaaaggagctcgaggacatgaagcacatgacaaggcaggagtttgtagcgtctctgagaaggaagagcagtggtttctccagaggtgcatccatttacaggggagtgactaggcatcaccaacatggaagatggcaagcacggattggacgagttgcagggaacaaggatctttacttgggcaccttcagcacccaggaggaggcagcggaggcgtacgacatcgcggcgatcaagttccgcggcctcaacgccgtcaccaacttcgacatgagccgctacgacgtgaagagcatcctggacagcagcgccctccccatcggcagcgccgccaagcgcctcaaggaggccgaggccgcagcgtccgcgcagcaccaccacgccggcgtggtgagctacgacgtcggccgcatcgcctcgcagctcggcgacggcggagccctggcggcggcgtacggcgcgcactaccacggcgccgcctggccgaccatcgcgttccagccgggcgccgccagcacaggcctgtaccacccgtacgcgcagcagccaatgcgcggcggcgggtggtgcaagcaggagcaggaccacgcggtgatcgcggccgcgcacagcctgcaggacctccaccacctgaacctgggcgcggccggcgcgcacgactttttctcggcagggcagcaggccgccgccgctgcgatgcacggcctgggtagcatcgacagtgcgtcgctcgagcacagcaccggctccaactccgtcgtctacaacggcggggtcggcgacagcaacggcgccagcgccgtcggcggcagtggcggtggctacatgatgccgatgagcgctgccggagcaaccactacatcggcaatggtgagccacgagcaggtgcatgcacgggcctacgacgaagccaagcaggctgctcagatggggtacgagagctacctggtgaacgcggagaacaatggtggcggaggtggaggcggctcgggtggcggaggctccggaggcggtggctcgacgtgcgccaaggacatccaaaaagcagccgcggaggcggcactcgcctttcaggacgagacctgcgacaccaccaccaccaaccacggcctcgacatggaggagaccatggtcgaagccatctacacccccgagcagagcgagggcgccttctacatggacgaagagacaatgttcggcatgccaaccctcctcgacaacatggccgaaggcatgctgctgccgcccccgagcgtccagtggaaccacaactacgacggcgaaggcgacggggatgtgtccctgtggagctactagggtacctgacatcttatagtctgcaacctctcgtgtctgaattcctatctttatcaagtgttattgcttccacgactataggacagctttcgtcgaaagcttttgctcatgtgatctcgaaggattcatctagtctgatttttcgtgacttgtatcggttttattggattcatccaacatatatcaataaaaaatgagttgtgtttcctttcttcctagttcagttaaaattatttccctcctgcgcttgtgctgtaattgtctgtgtacctgttgtttgtgactgtgttagttcccttggatatgatttcgtatttgatatgtacatggagatagcttagcttcattattggagtatgaagttagtatgacatagtcactctcctggaaaattgacactgcaaaccatatttttattctgaaccacaaatcctagtcagtccgctggcatatgccgtccgtttgctgaatccagaacgtgggtttggagatgtacggctgagatgcctctatgcgaaggggatttcgtggtgaaacgagatgggagtagagcaacgcccgtggaagatgcttcaaacttccacacttttgagcaacgatcggcagtagtaaggtagacgatttcaagatcaaagcatatgaagataaacaacatcaacaacaaaatttgttggggttctatagagagaaacagagctacatacatacactgttttgtatctaccatctgagatgatgaaaagatgaaaaactaaagaatgccccggcgccaacgccaggacacgccgcgcgcgcgtcacccgagccatctcttgacccagccggcgctgtatatttacacacgttgcagcatcgatcaccacctgttcgatcgcgtcgccgtcaccggcgcgccgcgacttattgaactagtctagggcgcggctaacaacctagcttagattgccttgtctaaacccttaggctaacgcgccactctagaaggccgatctcccccgaacgcgccagatccgatatcgatgggccctggccgaagcttggtcacccggtccgggcctagaaggccgatctcccgggcacccagctttcttgtacaaagtggccgttaacggatcggccagaatggcccggaccgggttaccccgcggttcaaagccaatgactgttgttaggtccagtttctaaggacgaatcatccaatcactggttctttctgaacaaaacaaagagctatagagttacgttactgtagccgagacagagcctgcaatctggttatgccacatactaggttctttcttaaagttgactcactctatcctaagttctacttacaaggagctacaacaaattggtcataaccggagagcgttcaaggaggtaatatcccatcttactctgtagcaaggctacaaaaggagagctaaagaactaggctacaaaaagagagctaaagaactaactatctagcaagactacagagctatagtgtagagatttcataaccggtgagcgttcaaggatactttgaagagaagaggtaatatctcaactagcaagactacaaaaaaatggagatataaaactaactgtctaacaagactacagagctatagtagagatagatacgttcgacacttaagcatgagaattcgagctcggtaccctggttcacaaactcaatacaacacacagtggagtagggtattacgctccggcggcccgaaccactctaaatccttgtgtcctcgtgtgctcttccaccattaatgactgtaattgcagggacacgaagagttgtagcgcttttgccaacaagatccgctatatgctagtagagtggaacctgcacagcaacaagcatccaataatctgagaataagaattatgtgtggtgatggttctcatctctgcaactcgccattttcgcgagagaaccaaatccaagttggtgaagatcatgatttgggctcatgggctggcatagtagctattacctttgcaattgtggttcgaatctatccgatattctccttttcagggagagctaatgcttatgcttattgggtattttggtttgacactgcttcacgcccaaaaaaaggcaactatgtctgagttggatatggcccaaaaaaaggcagctatgtctgagttggatatggaagtcttctttcgtttagggtgaagtaagaccaagctcatgagcttattatcttaggtcggaacaaattagttgataggcatggcacatttatcaaattataatgattttaacagaaaagcaacacctctttttcagcagcaccagctttgcaagctgcaattgacactccaagcatagtatttgctccaaactcagcctgcatttcgcacaatatcatatctatttccatttggataaaatatattttccagaaatatgggaacagaatcaagatacagaaaaaagttgtggtagtagtggtaagtggaaacacaagtacagtgaaaagatagcattatttctgaacagtcaaattaaccgaaataagtagtatcacatactgcccctaaattgactacacccaatgtaaagaattgcttgagcatattgagccatcagttgtttgtttgtgtaacggatttgacaatgcagagttcaggagcaaaaaaccgcaaaggagagaaagagggaaaggatctcctagtatcccaccttgtggcgcgccctgtcaagtgcatgatggcctggtcgatctgcgtctgctgctgcggttccatcccaacgagtgcctccgacaccttgtcgttgatcacccgcaccgcgtaggcgacccccctggcgaggaacttccgcctctcggaggccccggccgcgtcggcggcggcgccctcgagcgcgcccacgctagccgtagatgctcggtgcacggccttgttggtgtgcaactcgacctcaacggccggtgcgctacgcccgtcaaggatctggcgcgcccgcaccctcgtgatcacggtgggcgcctcccgcctcatgtggccgacgatgaaaagcgccgggttaggggccttggcgcgcaccgccgtattcagggcctcctcgctcttgcgcgagagcaggtgcttccccaggtactcctgcactgacaaggctgccacagcggtggaatttgtcctcacgacttcgccacgtcgtcctcacctccctggcttcccacgactccgccgtatcgaggtgctcggtgggtcgtcttaatccgaagtccgaactaggaagacgagacagagaggtctgaggaatgggcctcgtttgatgttgagctgaattatttttccagcataagcccaggtcttggtccatgaacaaaattactagaaacccagcccagtactacgatctaaaagagggactgccactggatagctctctctagcattctccacgctccaatacagcggcgtcgtgtctatccgggtctatccgcgaacacgtgagaactctccagaaactgctttctcctccacttcatctctctcgctttccctctataaaaagaccccttctaggaattgagggagacagcaagcaccaagcagcgatccgaagctcaatcaattcactcaaacctcttccccaaatcttcgattagatcttcgttgacaagaagactagaaccgaacctgacatgtccaacctgctcacggttcaccagaaccttccggctcttccagtggacgcgacgtccgatgaagtcaggaagaacctcatggacatgttccgcgacaggcaagcgttcagcgagcacacctggaagatgctgctctccgtctgccgctcctgggctgcatggtgcaagctgaacaacaggaagtggttccccgctgagcccgaggacgtgagggattaccttctgtacctgcaagcgcgaggtttgtttctgcttctacctttgatatatatataataattatcattaattagtagtaatataatatttcaaatatttttttcaaaataaaagaatgtagtatatagcaattgcttttctgtagtttataagtgtgtatattttaatttataacttttctaatatatgaccaaaacatggtgatgcctaggtctggcagtgaagaccatccagcaacaccttggacaactgaacatgcttcacaggcgctccggcctcccgcgccccagcgactcgaacgccgtgagcctcgtcatgcgccgcatcaggaaggaaaacgtcgatgccggcgaaagggcaaagcaggccctcgcgttcgagaggaccgatttcgaccaggtccgcagcctgatggagaacagcgacaggtgccaggacattaggaacctggcgttcctcggaattgcatacaacacgctcctcaggatcgcggaaattgcccgcattcgcgtgaaggacattagccgcaccgacggcggcaggatgcttatccacattggcaggaccaagacgctcgtttccaccgcaggcgtcgaaaaggccctcagcctcggagtgaccaagctcgtcgaacgctggatctccgtgtccggcgtcgcggacgacccaaacaactacctcttctgccgcgtccgcaagaacggggtggctgcccctagcgccaccagccaactcagcacgagggccttggaaggtattttcgaggccacccaccgcctgatctacggcgcgaaggatgacagcggtcaacgctacctcgcatggtccgggcactccgcccgcgttggagctgctagggacatggcccgcgccggtgtttccatccccgaaatcatgcaggcgggtggatggacgaacgtgaacattgtcatgaactacattcgcaaccttgacagcgagacgggcgcaatggttcgcctcctggaagatggtgactgaggtacccaacctagacttgtccatcttctggattggccaacttaattaatgtatgaaataaaaggatgcacacatagtgacatgctaatcactataatgtgggcatcaaagttgtgtgttatgtgtaattactagttatctgaataaaagagaaagagatcatccatatttcttatcctaaatgaatgtcacgtgtctttataattctttgatgaaccagatgcatttcattaaccaaatccatatacatataaatattaatcatatataattaatatcaattgggttagcaaaacaaatctagtctaggtgtgttttgcgatccgatatcgaattggccacggtaccagctgctgctgttctagggttcacaagtctgcctatttgtcttccccaatggagctatggttgtctggtctggtccttggtcgtgtcccgtttcattgtgtactatttacctgtaatgtgtatccttaagtctggtttgatggtgtctgaaacgttttgctgtggtagagcagcatggaagaactataatgaataagtgatccctaatcattgtgtccaaattttgcttctgctatacccttttgtgctgtttcttatgttttgcttaaaaatttgatctgacaaacaaatttgtctaaattatgctcttgttctgactgtgtactgtacacatttgtattgctaccggtttggcacatagttttctctttgattgcagatcaaacccttctgattgcagattgcttggctatggctgatgtgctcactgttcttctttagcttgtatattgctgatggtggcttggctacggctgaaaaagttgctgctgcgccgacttggcaactgttgctccagtaatgctttgtcctctcttcctagccgccgacttggcacttggcagctgttgctcctgtaatgcgttgttatctcttatctcttgagatgtactatgattttgaggctgtttgacttgtgccagattgccagtgctgatgctatattatctcaggtttttatgctagtatatgttttactgtgtgctgcctgtgtcgagttacgtaatctattgaaccgctatgcgtgttgatgccctgttgttgcttgccagattgatgcccctgttgcttgcagcttgcaagctgtagtgaaatcctaaaattccaaaccaaatctattctgaacttttgaagatctgtgatgtccggaagaaaagattcaaacagataaacgggactctccagaatctataaaataaatgatcgacaaacgctttgctttggtaggcttcaagcttggtcacccggtccgggcctagaaggccagcttcggccgccccgggcaactttattatacaaagttgatagataaatcagatatctggttcctaaggacccggcggaccgattaaactgattcggtccgacgcgttacctaataacttcgtatagcatacattatacgaagttattagctaactaactagtaagcgtacacctgagcggttaccgaattcctgcccttaaggccaattgttcaagattcattcaacaattgaaacatctcccatgattaaatcagtataaggttgctatggtcttgcttgacaaagtttttttttgagggaatttcaactaaatttttgagtgaaactatcaaatactgattttaaaaaatttttataaaaggaagcgcagagataaaaggccatctatgctacaaaagtacccaaaaatgtaatcctaaagtatgaattgcattttttttttgtttggacgaaaggaaaggagtattaccacaagaatgatatcatcttcatatttagatcttttttgggtaaagcttgagattctctaaatatagagaaatcagaagaaaaaaaaaccgtgttttggtggttttgatttctagcctccacaataactttgacggcgtcgacaagtctaacggacaccaagcagcgaaccaccagcgccgagccaagcgaagcagacggccgagacgttgacaccttcggcgcggcatctctcgagagttccgctccggcgctccacctccaccgctggcggtttcttattccgttccgttccgcctcctgctctgctcctctccacaccacacggcacgaaaccgttacggcaccggcagcacccagcacgggagaggggattcctttcccaccgttccttccctttccgccccgccgctataaatagccagccccatccccagcttttttccccaatctcatctcctctctcctgttgttcggagcacacgcacaatccgatcgatccccaaatccccttcgtctctcctcgcgagcctcgtggatcccagcttcaaggtacggcgatcgatcatcccccctccttctctctaccttcttttctctagactacatcggatggcgatccatggttagggcctgctagtttcccttcctgttttgtcgatggctgcgaggcacaatagatctgatggcgttatgacggctaacttgtcatgttgttgcgatttatagtccctttaggagatcagtttaatttctcggatggttcgagatcggtggtccatggttagtaccctaagatccgcgctgttagggttcgtagatggaggcgacctgttctgattgttaacttgtcagtacctgggaaatcctgggatggttctagctcgtccgcagatgagatcgatttcatgatcctctgtatcttgtttcgttgcctaggttccgtctaatctatccgtggtatgatgtagatgttttgatcgtgctaactacgtcttgtaaagttaattgtcaggtcataatttttagcatgcctttttttttgtttggttttgtctaattgggctgtcgttctagatcagagtagaagactgttccaaactacctgctggatttattgaacttggatctgtatgtgtgtcacatatcttcataaattcatgattaagatggattgaaatatcttttatctttttggtatggatagttctatatgttggtgtggctttgttagatgtatacatgcttagatacatgaagcaacgtgctgctactgtttagtaattgctgttcatttgtctaataaacagataaggatatgtatttatgttgctgttggttttgctggtactttgttggatacaaatgcttcaatacagaaaacagcatgctgctacgatttaccatttatctaatcttatcatatgtctaatctaataaacaaacatgcttttaaattatcttcatatgcttggatgatggcatacacagcggctatgtgtggttttttaaatacccagcatcatgggcatgcatgacactgctttaatatgctttttatttgcttgagactgtttcttttgtttatactgaccctttagttcggtgactcttctgcaggtcgactttaacttagcctaggatccatggcccagtccaagcacggcctgaccaaggagatgaccatgaagtaccgcatggagggctgcgtggacggccacaagttcgtgatcaccggcgagggcatcggctaccccttcaagggcaagcaggccatcaacctgtgcgtggtggagggcggccccttgcccttcgccgaggacatcttgtccgccgccttcatgtacggcaaccgcgtgttcaccgagtacccccaggacatcgtcgactacttcaagaactcctgccccgccggctacacctgggaccgctccttcctgttcgaggacggcgccgtgtgcatctgcaacgccgacatcaccgtgagcgtggaggagaactgcatgtaccacgagtccaagttctacggcgtgaacttccccgccgacggccccgtgatgaagaagatgaccgacaactgggagccctcctgcgagaagatcatccccgtgcccaagcagggcatcttgaagggcgacgtgagcatgtacctgctgctgaaggacggtggccgcttgcgctgccagttcgacaccgtgtacaaggccaagtccgtgccccgcaagatgcccgactggcacttcatccagcacaagctgacccgcgaggaccgcagcgacgccaagaaccagaagtggcacctgaccgagcacgccatcgcctccggctccgccttgccctccggactcagatctcgatagggtaccaatggccagttaacagatccagctgctgctgttctagggttcacaagtctgcctatttgtcttccccaatggagctatggttgtctggtctggtccttggtcgtgtcccgtttcattgtgtactatttacctgtaatgtgtatccttaagtctggtttgatggtgtctgaaacgttttgctgtggtagagcagcatggaagaactataatgaataagtgatccctaatcattgtgtccaaattttgcttctgctatacccttttgtgctgtttcttatgttttgcttaaaaatttgatctgacaaacaaatttgtctaaattatgctcttgttctgactgtgtactgtacacatttgtattgctaccggtttggcacatagttttctctttgattgcagatcaaacccttctgattgcagattgcttggctatggctgatgtgctcactgttcttctttagcttgtatattgctgatggtggcttggctacggctgaaaaagttgctgctgcgccgacttggcaactgttgctccagtaatgctttgtcctctcttcctagccgccgacttggcacttggcagctgttgctcctgtaatgcgttgttatctcttatctcttgagatgtactatgattttgaggctgtttgacttgtgccagattgccagtgctgatgctatattatctcaggtttttatgctagtatatgttttactgtgtgctgcctgtgtcgagttacgtaatctattgaaccgctatgcgtgttgatgccctgttgttgcttgccagattgatgcccctgttgcttgcagcttgcaagctgtagtgaaatcctaaaattcgaaaccaaatctattctgaacttttgaagatctgtgatgtccggaagaaaagattcaaacagataaacgggactctccagaatctataaaataaatgatcgacaaacgctttgctttggtaggcttcctagttagttagcggaccgaagcttcggtccgggcctgcggccgcagatatcagaacctgcgtctggacgcacaagtcatagcattatcggctaaaatttcttaatttctaaattagtcatatcggctaagaaagtggggagcactatcatttcgtagaacaagaacaaggtatcatatatatatatatatataatatttaaactttgttaagtggaatcaaagtgctagtattaatggagtttcatgtgcattaaattttatgtcacatcagcaattttgttgacttggcaaggtcatttagggtgtgtttggaagacaggggctattaggagtattaaacatagtctaattacaaaactaattgcacaaccgctaagctgaatcgcgagatggatctattaagcttaattagtccatgatttgacaatgtggtgctacaataaccatttgctaatgatggattacttaggtttaatagattcgtctcgtgatttagcctatgggttctgctattaattttgtaattagctcatatttagttcttataattagtatccgaacatccaatgtgacatgctaaagtttaaccctggtatccaaatgaagtcttatgagagtttcatcactccggtggtatatgtacttaggctccgttttcttccaccgacttatttttagcacccgtcacattgaatgtttagatactaattagaagtattaaacgtagactatttacaaaatccattacataagacgaatctaaacggcgagacgaatctattaaacctaattagtccatgatttgacaatgtgttgctacagtaaacatttgctaatgatggattaattaggcttaatagattcgtctcgccgtttagcctccacttatgtaatgggttttctaaacaatctacgtttaatactcctaattagtatctaaatattcaatgtgacacgtgctaaaaataagtcagtggaaggaagagaacgtccccttagttttccatcttattaattgtacgatgaaactgtgcagccagatgattgacaatcgcaatacttcaactagtgggccatgcacatcagcgacgtgtaacgtcgtgagttgctgttcccgtagagaaatatcaactggtgggccacgcacatcagcgtcgtgtaacgtggacggaggagccccgtgacggcgtcgacatcgaacggccaccaaccacggaaccacccgtccccacctctcggaagctccgctccacggcgtcgacatctaacggctaccagcaggcgtacgggttggagtggactccttgcctctttgcgctggcggcttccggaaattgcgtggcggagacgaggcgggctcgtctcacacggcacggaagacgtcacgggttccttccccacctctcctcttccccaccgccataaatagccgaccccctcgcctttctccccaatctcatctcgtctcgtgttgttcggagcacaccacccgccccaaatcgttcttcccgcaagcctcggcgatccttcacccgcttcaaggtacggcgatcgtcttcctcctctagatcggcgtgatctgcaagtagttgatttggtagatggttaggatctgtgcactgaagaaatcatgttagatccgcgatgtttctgttcgtagatggctgggaggtggaatttttgtgtagatctgatatgttctcctgtttatcttgtcacgctcctgcgatttgtggggattttaggtcgttgatctgggaatcgtggggttgcttctaggctgttcgtagatgaggtcgttctcacggtttactggatcattgcctagtagatcagctcgggctttcgtctttgtatatggtgcccatacttgcatctatgatctggttccgtggtgttacctaggtttctgcgcctgattcgtccgatcgattttgttagcatgtggtaaacgtttggtcatggtctgatttagattagagtcgaataggatgatctcgatctagctcttgggattaatatgcatgtgtcaccaatctgttccgtggttaagatgatgaatctatgcttagttaatgggtgtagatatatatgctgctgttcctcaatgatgccgtagcttttacctgagcagcatggatcgtcctgttacttaggtagatgcacatgcttatagatcaagatatgtactgctactgttggaattctttagtatacctgatgatcatccatgctcttgttacttgttttggtatacttggatgatggcatgctgctgctttttgttgatttgagcccatccatatctgcatatgtcacatgattaagatgattacgctgtttctgtatgatgccatagcttttatgtgagcaacatgcatcctcctggttatatgcattaatagatggaagatatctattgctacaatttgatgattattttgtacatacgatgatcaagcatgctcttcatactttgttgatatacttggataatgaaatgctgctgcacgttcattctatagcactaatgatgtgatgaacacgcacgacctgtttgtggcatctgtttgaatgtgttgttgctgttcactagagactgttttattaacctactgctagatacttacccttctgtctgtttattcttttgcagccagaatagcggatccgcccatggtcgaacaggacggcctgcatgcaggatcaccagcggcctgggtcgaaagactcttcggctacgactgggcacaacagaccatcgggtgtagcgacgcagctgttttcaggctgtccgcacagggcagacccgttttgttcgtcaaaacagacctgtctggcgcgctcaacgaactgcaagacgaggccgcaagactgagctggcttgctaccacaggcgttccttgtgctgcagtcctcgacgtcgttactgaggctggaagagactggctgctcctgggtgaagtcccaggacaggaccttttgtccagccatctggcacctgccgaaaaggtcagcatcatggcagacgccatgagaaggctgcacacactcgaccctgcaacatgccccttcgatcaccaggcaaaacacaggatcgagcgcgcaagaacgcgcatggaggctggtttggtcgaccaagatgacctcgacgaggaacaccaaggactggctcctgctgaactcttcgccagactcaaggcgagaatgccagacggtgacgacctggtcgtcacacacggcgacgcttgtctcccaaacataatggtcgagaacggacgcttcagcggtttcatcgactgcggtagactcggagtcgctgacagataccaggacatcgccctggcaacacgcgacatcgcagaggaactcggaggcgaatgggctgacaggtttctcgtgctctacggtatcgctgctccagacagccagaggatcgcattctacaggctcctcgacgagttcttttagttcgaacggtacccggggatcctctagtgccgtgggtcgtttaagctgccgctgtacctgtgtcgtctggtgccttctggtgtacctgggaggttgtcgtctatcaagtatctgtggttggtgtcatgagtcagtgagtcccaatactgttcgtgtcctgtgtgcattatacccaaaactgttatgggcaaatcatgaataagcttgatgttcgaacttaaaagtctctgctcaatatggtattatggttgtttttgttcgtctcctaatatttgcctgggatcaaattttattggctggtgttcatttgacctccatgttcttgctaggctccattttttactctacagccataatatgtttgattgtttggtttgttctttgttgtacacctggttctgtcgagcttagttttcgacactggcttacagcttaacatgttgctattttattgggttctgattgctattttattgggttctgattgctagtttttgctgaatccaaaaaccatgttatttatttaagcgatccaggttattattatgatggtggctaagtttttttttttccaagggtaaattttctggattctccagtgtttctgtggccgaattcaatcactagagtcgacctgcatgattccgatgacttcgtaggttcctagctcaagccgctcgtgtccaagcgtcacttacgattagctaatgattacggcatctaggaccgactagctagctagctaagagctcggtaccgagctcgaattcattccgattaatcgtggcctcttgctcttcaggatgaagagctatgtttaaacgtgcaagcgctactagacaattcagtacattaaaaacgtccgcaatgtgttattaagttgtctaagcgtcaatttgtttacaccacaatatatcctgcca

SEQ ID NO: 10 - DNA, 22389 bp, synthetic construct
  source 1..22389: mol_type = other DNA
gtttacccgccaatatatcctgtcaaacactgcggccgcacttgaccgcggatggagccggagctgtggtgaggccatcgacgggaggtgggggagaacacagtctcagtgttctttgtgagtccgcaaggtttttagcttttctgtattaattaaggttgctgttggctgtagaatacggtcgtggaagagctgtatcggtagctactacgtaagctattatatactggaagtctggagctcgtcgatctccggtcgtcttcctccatttctcctcgtcttgctttgactgctgctaccatttgcttctgttttctgatgaagcatgccatgtcggccaccagtgtttgtgtggtttttgcagggaatggctttcaagtgctgtgattgaatggccctcgtcgtcctcggctgagctcacatggacgcgtcatgtgagtgagatatatgatcatatgatgagtggggttcgggtgagtgcgtacttgaagtaggatcccgctttcactcattcattcattggcctttaaaccgggaaattttcgcgaggagatggagggaagcaagcagggtgacgagtgcagagtgccgcgagcgctttgtcaaaaggcaccgccgtaggcaaaaaaatcaatggccctgactgactcgatggtagtactactgtagagactagagagggttgctccccatatcttcgtgtgacttttactccagcattgcatttccgtcattgagacgttaattaatagcagctttcgggacagatgactgtggccatgtttcgtcacggccgcttcgtgccagctgggggtactatagtactgtgattttgttagtaaaaactttcattaggccaccattgacgaccgggccttcgcttttgctgcgctaattaaccatttcccggcgaccgaagggaacatgaacatgccccgacacatgagggcatgaggactagtgttctccctgtcgttcgttgacttgactagtgatagtttaaacgctcttcaactggaagagcggttactaccggttcactagctagctgctaatcgagctagttaccctatgaggtgacatgaagcgctcacggttactatgacggttagcttcacgactgttggtggcagtagcgtacgacttagctatagttccggacttacccttaagataacttcgtatagcatacattatacgaagttatgggcccacgcgtgaagagcggttaccagagctggtcacctttgtccaccaagatggaactgtcttcggccagaatggccatctggattcagcaggcctagaaggccatttatcgctatcaactttgtatagaaaagttgggccgaattcgagctcggtacggccagaatggcccggaccgaagcttgcggccgcacactgatagtttaaactgaaggcgggaaacgacaatctgatcatgagcggagaattaagggagtcacgttatgacccccgccgatgacgcgggacaagccgttttacgtttggaactgacagaaccgcaacgttgaaggagccactcagccgcgggtttctggagtttaatgagctaagcacatacgtcagaaaccattattgcgcgttcaaaagtcgcctaaggtcactatcagctagcaaatatttcttgtcaaaaatgctccactgacgttccataaattcccctcggtatccaattagagtctcatattcactctcccgggggatctcgactctagaggatcgctcaggaaggccgctgagatagaggcatggcggccaatgcgggcggcggtggagcgggaggaggcagcggcagcggcagcgtggctgcgccggcggtgtgccgccccagcggctcgcggtggacgccgacgccggagcagatcaggatgctgaaggagctctactacggctgcggcatccggtcgcccagctcggagcagatccagcgcatcaccgccatgctgcggcagcacggcaagatcgagggcaagaacgtcttctactggttccagaaccacaaggcccgcgagcgccagaagcgccgcctcaccagcctcgacgtcaacgtgcccgccgccggcgcggccgacgccaccaccagccaactcggcgtcctctcgctgtcgtcgccgccgccttcaggcgcggcgcctccctcgcccaccctcggcttctacgccgccggcaatggcggcggatcggctgtgctgctggacacgagttccgactggggcagcagcggcgctgccatggccaccgagacatgcttcctgcaggactacatgggcgtgacggacacgggcagctcgtcgcagtggccacgcttctcgtcgtcggacacgataatggcggcggccgcggcgcgggcggcgacgacgcgggcgcccgagacgctccctctcttcccgacctgcggcgacgacggcggcagcggtagcagcagctacttgccgttctggggtgccgcgtccacaactgccggcgccacttcttccgttgcgatccagcagcaacaccagctgcaggagcagtacagcttttacagcaacagcaacagcacccagctggccggcaccggcaaccaagacgtatcggcaacagcagcagcagccgccgccctggagctgagcctcagctcatggtgctccccttaccctgctgcagggagtatgtgagagcaacgcgagctgccactgctcttcactgatgtctctggaatggaaggaggaggaagtgagcatagcgttggtgcgttgctgtcaagggcgaattcacatggttaaccgacaaagcagcattagtccgttgatcggtggaagaccactcgtcagtgttgagttgaatgtttgatcaataaaatacggcaatgctgtaagggttgttttttatgccattgataatacactgtactgttcagttgttgaactctatttcttagccatgccaagtgcttttcttattttgaataacattacagcaaaaagttgaaagacaaaaaaaaaaacccccgaacagagtgctttgggtcccaagcttctttagactgtgttcggcgttccccctaaatttctccccctatatctcactcacttgtcacatcagcgttctctttccccctatatctccacgctctacagcagttccacctatatcaaacctctataccccaccacaacaatattatatactttcatcttcaactaactcatgtaccttccaatttttttctactaataattatttacgtgcacagaaacttagcaaggagagagagagcgggaatgcggccgccaccgcggtggagctcgaattccggtccgggcctagaaggccagcttcaagtttgtacaaaaaagcaggctccggccagaatctcactgactagctaaacagcggccgcgggcccggtgaccaatcgaattagcttggcgcgtggaccgaagcttgcatgcctgcagtgcagcgtgacccggtcgtgcccctctctagagataatgagcattgcatgtctaagttataaaaaattaccacatattttttttgtcacacttgtttgaagtgcagtttatctatctttatacatatatttaaactttactctacgaataatataatctatagtactacaataatatcagtgttttagagaatcatataaatgaacagttagacatggtctaaaggacaattgagtattttgacaacaggactctacagttttatctttttagtgtgcatgtgttctcctttttttttgcaaatagcttcacctatataatacttcatccattttattagtacatccatttagggtttagggttaatggtttttatagactaatttttttagtacatctattttattctattttagcctctaaattaagaaaactaaaactctattttagtttttttatttaataatttagatataaaatagaataaaataaagtgactaaaaattaaacaaataccctttaagaaattaaaaaaactaaggaaacatttttcttgtttcgagtagataatgccagcctgttaaacgccgtcgacgagtctaacggacaccaaccagcgaaccagcagcgtcgcgtcgggccaagcgaagcagacggcacggcatctctgtcgctgcctctggacccctctcgagagttccgctccaccgttggacttgctccgctgtcggcatccagaaattgcgtggcggagcggcagacgtgagccggcacggcaggcggcctcctcctcctctcacggcaccggcagctacgggggattcctttcccaccgctccttcgctttcccttcctcgcccgccgtaataaatagacaccccctccacaccctctttccccaacctcgtgttgttcggagcgcacacacacacaaccagatctcccccaaatccacccgtcggcacctccgcttcaaggtacgccgctcgtcctcccccccccccctctctaccttctctagatcggcgttccggtccatgcatggttagggcccggtagttctacttctgttcatgtttgtgttagatccgtgtttgtgttagatccgtgctgctagcgttcgtacacggatgcgacctgtacgtcagacacgttctgattgctaacttgccagtgtttctctttggggaatcctgggatggctctagccgttccgcagacgggatcgatttcatgattttttttgtttcgttgcatagggtttggtttgcccttttcctttatttcaatatatgccgtgcacttgtttgtcgggtcatcttttcatgcttttttttgtcttggttgtgatgatgtggtctggttgggcggtcgttctagatcggagtagaattctgtttcaaactacctggtggatttattaattttggatctgtatgtgtgtgccatacatattcatagttacgaattgaagatgatggatggaaatatcgatctaggataggtatacatgttgatgcgggttttactgatgcatatacagagatgctttttgttcgcttggttgtgatgatgtggtgtggttgggcggtcgttcattcgttctagatcggagtagaatactgtttcaaactacctggtgtatttattaattttggaactgtatgtgtgtgtcatacatcttcatagttacgagtttaagatggatggaaatatcgatctaggataggtatacatgttgatgtgggttttactgatgcatatacatgatggcatatgcagcatctattcatatgctctaaccttgagtacctatctattataataaacaagtatgttttataattattttgatcttgatatacttggatgatggcatatgcagcagctatatgtggatttttttagcactgccttcatacgctatttatttgcttggtactgtttcttttgtcgatgctcaccctgttgtttggtgttacttctgcaggtcgactttaacttagcctaggatccatggccactgtgaacaactggctcgctttctccctctccccgcaggagctgccgccctcccagacgacggactccacactcatctcggccgccaccgccgaccatgtctccggcgatgtctgcttcaacatcccccaagattggagcatgaggggatcagagctttcggcgctcgtcgcggagccgaagctggaggacttcctcggcggcatctccttctccgagcagcatcacaaggccaactgcaacatgatacccagcactagcagcacagtttgctacgcgagctcaggtgctagcaccggctaccatcaccagctgtaccaccagcccaccagctcagcgctccacttcgcggactccgtaatggtggcttcctcggccggtgtccacgacggcggtgccatgctcagcgcggccgccgctaacggtgtcgctggcgctgccagtgccaacggcggcggcatcgggctgtccatgattaagaactggctgcggagccaaccggcgcccatgcagccgagggtggcggcggctgagggcgcgcaggggctctctttgtccatgaacatggcggggacgacccaaggcgctgctggcatgccacttctcgctggagagcgcgcacgggcgcccgagagtgtatcgacgtcagcacagggtggagccgtcgtcgtcacggcgccgaaggaggatagcggtggcagcggtgttgccggcgctctagtagccgtgagcacggacacgggtggcagcggcggcgcgtcggctgacaacacggcaaggaagacggtggacacgttcgggcagcgcacgtcgatttaccgtggcgtgacaaggcatagatggactgggagatatgaggcacatctttgggataacagttgcagaagggaagggcaaactcgtaagggtcgtcaagtctatttaggtggctatgataaagaggagaaagctgctagggcttatgatcttgctgctctgaagtactggggtgccacaacaacaacaaattttccagtgagtaactacgaaaaggagctcgaggacatgaagcacatgacaaggcaggagtttgtagcgtctctgagaaggaagagcagtggtttctccagaggtgcatccatttacaggggagtgactaggcatcaccaacatggaagatggcaagcacggattggacgagttgcagggaacaaggatctttacttgggcaccttcagcacccaggaggaggcagcggaggcgtacgacatcgcggcgatcaagttccgcggcctcaacgccgtcaccaacttcgacatgagccgctacgacgtgaagagcatcctggacagcagcgccctccccatcggcagcgccgccaagcgcctcaaggaggccgaggccgcagcgtccgcgcagcaccaccacgccggcgtggtgagctacgacgtcggccgcatcgcctcgcagctcggcgacggcggagccctggcggcggcgtacggcgcgcactaccacggcgccgcctggccgaccatcgcgttccagccgggcgccgccagcacaggcctgtaccacccgtacgcgcagcagccaatgcgcggcggcgggtggtgcaagcaggagcaggaccacgcggtgatcgcggccgcgcacagcctgcaggacctccaccacctgaacctgggcgcggccggcgcgcacgactttttctcggcagggcagcaggccgccgccgctgcgatgcacggcctgggtagcatcgacagtgcgtcgctcgagcacagcaccggctccaactccgtcgtctacaacggcggggtcggcgacagcaacggcgccagcgccgtcggcggcagtggcggtggctacatgatgccgatgagcgctgccggagcaaccactacatcggcaatggtgagccacgagcaggtgcatgcacgggcctacgacgaagccaagcaggctgctcagatggggtacgagagctacctggtgaacgcggagaacaatggtggcggaaggatgtctgcatgggggactgtcgtgtctgcagctgcggcggcagcagcaagcagcaacgacaacatggccgccgacgtcgggcatggcggcgcgcagctcttcagtgtctggaacgacactggtggaggcggctcgggtggcggaggctccggaggcggtggctcgacgtgcgccaaggacatccaaaaagcagcagcggaggcggcactcgcctttcaggacgagacctgcgacaccaccaccaccaaccacggcctcgacatggaggagaccatggtcgaagccatctacacccccgagcagagcgagggcgccttctacatggacgaagagacaatgttcggcatgccaaccctcctcgacaacatggccgaaggcatgctgctgccgcccccgagcgtccagtggaaccacaactacgacggcgaaggcgacggggatgtgtccctgtggagctactaggcgtacctagtggtacctgacatcttatagtctgcaacctctcgtgtctgaattcctatctttatcaagtgttattgcttccacgactataggacagctttcgtcgaaagcttttgctcatgtgatctcgaaggattcatctagtctgatttttcgtgacttgtatcggttttattggattcatccaacatatatcaataaaaaatgagttgtgtttcctttcttcctagttcagttaaaattatttccctcctgcgcttgtgctgtaattgtctgtgtacctgttgtttgtgactgtgttagttcccttggatatgatttcgtatttgatatgtacatggagatagcttagcttcattattggagtatgaagttagtatgacatagtcactctcctggaaaattgacactgcaaaccatatttttattctgaaccacaaatcctagtcagtccgctggcatatgccgtccgtttgctgaatccagaacgtgggtttggagatgtacggctgagatgcctctatgcgaaggggatttcgtggtgaaacgagatgggagtagagcaacgcccgtggaagatgcttcaaacttccacacttttgagcaacgatcggcagtagtaaggtagacgatttcaagatcaaagcatatgaagataaacaacatcaacaacaaaatttgttggggttctatagagagaaacagagctacatacatacactgttttgtatctaccatctgagatgatgaaaagatgaaaaactaaagaatgccccggcgccaacgccaggacacgccgcgcgcgcgtcacccgagccatctcttgacccagccggcgctgtatatttacacacgttgcagcatcgatcaccacctgttcgatcgcgtcgccgtcaccggcgcgccgcgacttattgaactagtctagggcgcggctaacaacctagcttagattgccttgtctaaacccttaggctaacgcgccactctagaaggccgatctcccccgaacgcgccagatccgatatcgatgggccctggccgaagcttggtcacccggtccgggcctagaaggccgatctcccgggcacccagctttcttgtacaaagtggccgttaacggatcggccagaatggcccggaccgggttaccccgcggttcaaagccaatgactgttgttaggtccagtttctaaggacgaatcatccaatcactggttctttctgaacaaaacaaagagctatagagttacgttactgtagccgagacagagcctgcaatctggttatgccacatactaggttctttcttaaagttgactcactctatcctaagttctacttacaaggagctacaacaaattggtcataaccggagagcgttcaaggaggtaatatcccatcttactctgtagcaaggctacaaaaggagagctaaagaactaggctacaaaaagagagctaaagaactaactatctagcaagactacagagctatagtgtagagatttcataaccggtgagcgttcaaggatactttgaagagaagaggtaatatctcaactagcaagactacaaaaaaatggagatataaaactaactgtctaacaagactacagagctatagtagagatagatacgttcgacacttaagcatgagaattcgagctcggtaccctggttcacaaactcaatacaacacacagtggagtagggtattacgctccggcggcccgaaccactctaaatccttgtgtcctcgtgtgctcttccaccattaatgactgtaattgcagggacacgaagagttgtagcgcttttgccaacaagatccgctatatgctagtagagtggaacctgcacagcaacaagcatccaataatctgagaataagaattatgtgtggtgatggttctcatctctgcaactcgccattttcgcgagagaaccaaatccaagttggtgaagatcatgatttgggctcatgggctggcatagtagctattacctttgcaattgtggttcgaatctatccgatattctccttttcagggagagctaatgcttatgcttattgggtattttggtttgacactgcttcacgcccaaaaaaaggcaactatgtctgagttggatatggcccaaaaaaaggcagctatgtctgagttggatatggaagtcttctttcgtttagggtgaagtaagaccaagctcatgagcttattatcttaggtcggaacaaattagttgataggcatggcacatttatcaaattataatgattttaacagaaaagcaacacctctttttcagcagcaccagctttgcaagctgcaattgacactccaagcatagtatttgctccaaactcagcctgcatttcgcacaatatcatatctatttccatttggataaaatatattttccagaaatatgggaacagaatcaagatacagaaaaaagttgtggtagtagtggtaagtggaaacacaagtacagtgaaaagatagcattatttctgaacagtcaaattaaccgaaataagtagtatcacatactgcccctaaattgactacacccaatgtaaagaattgcttgagcatattgagccatcagttgtttgtttgtgtaacggatttgacaatgcagagttcaggagcaaaaaaccgcaaaggagagaaagagggaaaggatctcctagtatcccaccttgtggcgcgccctgtcaagtgcatgatggcctggtcgatctgcgtctgctgctgcggttccatcccaacgagtgcctccgacaccttgtcgttgatcacccgcaccgcgtaggcgacccccctggcgaggaacttccgcctctcggaggccccggccgcgtcggcggcggcgccctcgagcgcgcccacgctagccgtagatgctcggtgcacggccttgttggtgtgcaactcgacctcaacggccggtgcgctacgcccgtcaaggatctggcgcgcccgcaccctcgtgatcacggtgggcgcctcccgcctcatgtggccgacgatgaaaagcgccgggttaggggccttggcgcgcaccgccgtattcagggcctcctcgctcttgcgcgagagcaggtgcttccccaggtactcctgcactgacaaggctgccacagcggtggaatttgtcctcacgacttcgccacgtcgtcctcacctccctggcttcccacgactccgccgtatcgaggtgctcggtgggtcgtcttaatccgaagtccgaactaggaagacgagacagagaggtctgaggaatgggcctcgtttgatgttgagctgaattatttttccagcataagcccaggtcttggtccatgaacaaaattactagaaacccagcccagtactacgatctaaaagagggactgccactggatagctctctctagcattctccacgctccaatacagcggcgtcgtgtctatccgggtctatccgcgaacacgtgagaactctccagaaactgctttctcctccacttcatctctctcgctttccctctataaaaagaccccttctaggaattgagggagacagcaagcaccaagcagcgatccgaagctcaatcaattcactcaaacctcttccccaaatcttcgattagatcttcgttgacaagaagactagaaccgaacctgacatgtccaacctgctcacggttcaccagaaccttccggctcttccagtggacgcgacgtccgatgaagtcaggaagaacctcatggacatgttccgcgacaggcaagcgttcagcgagcacacctggaagatgctgctctccgtctgccgctcctgggctgcatggtgcaagctgaacaacaggaagtggttccccgctgagcccgaggacgtgagggattaccttctgtacctgcaagcgcgaggtttgtttctgcttctacctttgatatatatataataattatcattaattagtagtaatataatatttcaaatatttttttcaaaataaaagaatgtagtatatagcaattgcttttctgtagtttataagtgtgtatattttaatttataacttttctaatatatgaccaaaacatggtgatgcctaggtctggcagtgaagaccatccagcaacaccttggacaactgaacatgcttcacaggcgctccggcctcccgcgccccagcgactcgaacgccgtgagcctcgtcatgcgccgcatcaggaaggaaaacgtcgatgccggcgaaagggcaaagcaggccctcgcgttcgagaggaccgatttcgaccaggtccgcagcctgatggagaacagcgacaggtgccaggacattaggaacctggcgttcctcggaattgcatacaacacgctcctcaggatcgcggaaattgcccgcattcgcgtgaaggacattagccgcaccgacggcggcaggatgcttatccacattggcaggaccaagacgctcgtttccaccgcaggcgtcgaaaaggccctcagcctcggagtgaccaagctcgtcgaacgctggatctccgtgtccggcgtcgcggacgacccaaacaactacctcttctgccgcgtccgcaagaacggggtggctgcccctagcgccaccagccaactcagcacgagggccttggaaggtattttcgaggccacccaccgcctgatctacggcgcgaaggatgacagcggtcaacgctacctcgcatggtccgggcactccgcccgcgttggagctgctagggacatggcccgcgccggtgtttccatccccgaaatcatgcaggcgggtggatggacgaacgtgaacattgtcatgaactacattcgcaaccttgacagcgagacgggcgcaatggttcgcctcctggaagatggtgactgaggtacccaacctagacttgtccatcttctggattggccaacttaattaatgtatgaaataaaaggatgcacacatagtgacatgctaatcactataatgtgggcatcaaagttgtgtgttatgtgtaattactagttatctgaataaaagagaaagagatcatccatatttcttatcctaaatgaatgtcacgtgtctttataattctttgatgaaccagatgcatttcattaaccaaatccatatacatataaatattaatcatatataattaatatcaattgggttagcaaaacaaatctagtctaggtgtgttttgcgatccgatatcgaattggccacggtaccagctgctgctgttctagggttcacaagtctgcctatttgtcttccccaatggagctatggttgtctggtctggtccttggtcgtgtcccgtttcattgtgtactatttacctgtaatgtgtatccttaagtctggtttgatggtgtctgaaacgttttgctgtggtagagcagcatggaagaactataatgaataagtgatccctaatcattgtgtccaaattttgcttctgctatacccttttgtgctgtttcttatgttttgcttaaaaatttgatctgacaaacaaatttgtctaaattatgctcttgttctgactgtgtactgtacacatttgtattgctaccggtttggcacatagttttctctttgattgcagatcaaacccttctgattgcagattgcttggctatggctgatgtgctcactgttcttctttagcttgtatattgctgatggtggcttggctacggctgaaaaagttgctgctgcgccgacttggcaactgttgctccagtaatgctttgtcctctcttcctagccgccgacttggcacttggcagctgttgctcctgtaatgcgttgttatctcttatctcttgagatgtactatgattttgaggctgtttgacttgtgccagattgccagtgctgatgctatattatctcaggtttttatgctagtatatgttttactgtgtgctgcctgtgtcgagttacgtaatctattgaaccgctatgcgtgttgatgccctgttgttgcttgccagattgatgcccctgttgcttgcagcttgcaagctgtagtgaaatcctaaaattccaaaccaaatctattctgaacttttgaagatctgtgatgtccggaagaaaagattcaaacagataaacgggactctccagaatctataaaataaatgatcgacaaacgctttgctttggtaggcttcaagcttggtcacccggtccgggcctagaaggccagcttcggccgccccgggcaactttattatacaaagttgatagataaatcagatatctggttcctaaggacccggcggaccgattaaactgattcggtccgacgcgttacctaataacttcgtatagcatacattatacgaagttattagctaactaactagtaagcgtacacctgagcggttaccgaattcctgcccttaaggccaattgttcaagattcattcaacaattgaaacatctcccatgattaaatcagtataaggttgctatggtcttgcttgacaaagtttttttttgagggaatttcaactaaatttttgagtgaaactatcaaatactgattttaaaaaatttttataaaaggaagcgcagagataaaaggccatctatgctacaaaagtacccaaaaatgtaatcctaaagtatgaattgcattttttttttgtttggacgaaaggaaaggagtattaccacaagaatgatatcatcttcatatttagatcttttttgggtaaagcttgagattctctaaatatagagaaatcagaagaaaaaaaaaccgtgttttggtggttttgatttctagcctccacaataactttgacggcgtcgacaagtctaacggacaccaagcagcgaaccaccagcgccgagccaagcgaagcagacggccgagacgttgacaccttcggcgcggcatctctcgagagttccgctccggcgctccacctccaccgctggcggtttcttattccgttccgttccgcctcctgctctgctcctctccacaccacacggcacgaaaccgttacggcaccggcagcacccagcacgggagaggggattcctttcccaccgttccttccctttccgccccgccgctataaatagccagccccatccccagcttttttccccaatctcatctcctctctcctgttgttcggagcacacgcacaatccgatcgatccccaaatccccttcgtctctcctcgcgagcctcgtggatcccagcttcaaggtacggcgatcgatcatcccccctccttctctctaccttcttttctctagactacatcggatggcgatccatggttagggcctgctagtttcccttcctgttttgtcgatggctgcgaggcacaatagatctgatggcgttatgacggctaacttgtcatgttgttgcgatttatagtccctttaggagatcagtttaatttctcggatggttcgagatcggtggtccatggttagtaccctaagatccgcgctgttagggttcgtagatggaggcgacctgttctgattgttaacttgtcagtacctgggaaatcctgggatggttctagctcgtccgcagatgagatcgatttcatgatcctctgtatcttgtttcgttgcctaggttccgtctaatctatccgtggtatgatgtagatgttttgatcgtgctaactacgtcttgtaaagttaattgtcaggtcataatttttagcatgcctttttttttgtttggttttgtctaattgggctgtcgttctagatcagagtagaagactgttccaaactacctgctggatttattgaacttggatctgtatgtgtgtcacatatcttcataaattcatgattaagatggattgaaatatcttttatctttttggtatggatagttctatatgttggtgtggctttgttagatgtatacatgcttagatacatgaagcaacgtgctgctactgtttagtaattgctgttcatttgtctaataaacagataaggatatgtatttatgttgctgttggttttgctggtactttgttggatacaaatgcttcaatacagaaaacagcatgctgctacgatttaccatttatctaatcttatcatatgtctaatctaataaacaaacatgcttttaaattatcttcatatgcttggatgatggcatacacagcggctatgtgtggttttttaaatacccagcatcatgggcatgcatgacactgctttaatatgctttttatttgcttgagactgtttcttttgtttatactgaccctttagttcggtgactcttctgcaggtcgactttaacttagcctaggatccatggcccagtccaagcacggcctgaccaaggagatgaccatgaagtaccgcatggagggctgcgtggacggccacaagttcgtgatcaccggcgagggcatcggctaccccttcaagggcaagcaggccatcaacctgtgcgtggtggagggcggccccttgcccttcgccgaggacatcttgtccgccgccttcatgtacggcaaccgcgtgttcaccgagtacccccaggacatcgtcgactacttcaagaactcctgccccgccggctacacctgggaccgctccttcctgttcgaggacggcgccgtgtgcatctgcaacgccgacatcaccgtgagcgtggaggagaactgcatgtaccacgagtccaagttctacggcgtgaacttccccgccgacggccccgtgatgaagaagatgaccgacaactgggagccctcctgcgagaagatcatccccgtgcccaagcagggcatcttgaagggcgacgtgagcatgtacctgctgctgaaggacggtggccgcttgcgctgccagttcgacaccgtgtacaaggccaagtccgtgccccgcaagatgcccgactggcacttcatccagcacaagctgacccgcgaggaccgcagcgacgccaagaaccagaagtggcacctgaccgagcacgccatcgcctccggctccgccttgccctccggactcagatctcgatagggtaccaatggccagttaacagatccagctgctgctgttctagggttcacaagtctgcctatttgtcttccccaatggagctatggttgtctggtctggtccttggtcgtgtcccgtttcattgtgtactatttacctgtaatgtgtatccttaagtctggtttgatggtgtctgaaacgttttgctgtggtagagcagcatggaagaactataatgaataagtgatccctaatcattgtgtccaaattttgcttctgctatacccttttgtgctgtttcttatgttttgcttaaaaatttgatctgacaaacaaatttgtctaaattatgctcttgttctgactgtgtactgtacacatttgtattgctaccggtttggcacatagttttctctttgattgcagatcaaacccttctgattgcagattgcttggctatggctgatgtgctcactgttcttctttagcttgtatattgctgatggtggcttggctacggctgaaaaagttgctgctgcgccgacttggcaactgttgctccagtaatgctttgtcctctcttcctagccgccgacttggcacttggcagctgttgctcctgtaatgcgttgttatctcttatctcttgagatgtactatgattttgaggctgtttgacttgtgccagattgccagtgctgatgctatattatctcaggtttttatgctagtatatgttttactgtgtgctgcctgtgtcgagttacgtaatctattgaaccgctatgcgtgttgatgccctgttgttgcttgccagattgatgcccctgttgcttgcagcttgcaagctgtagtgaaatcctaaaattcgaaaccaaatctattctgaacttttgaagatctgtgatgtccggaagaaaagattcaaacagataaacgggactctccagaatctataaaataaatgatcgacaaacgctttgctttggtaggcttcctagttagttagcggaccgaagcttcggtccgggcctgcggccgcagatatcagaacctgcgtctggacgcacaagtcatagcattatcggctaaaatttcttaatttctaaattagtcatatcggctaagaaagtggggagcactatcatttcgtagaacaagaacaaggtatcatatatatatatatatataatatttaaactttgttaagtggaatcaaagtgctagtattaatggagtttcatgtgcattaaattttatgtcacatcagcaattttgttgacttggcaaggtcatttagggtgtgtttggaagacaggggctattaggagtattaaacatagtctaattacaaaactaattgcacaaccgctaagctgaatcgcgagatggatctattaagcttaattagtccatgatttgacaatgtggtgctacaataaccatttgctaatgatggattacttaggtttaatagattcgtctcgtgatttagcctatgggttctgctattaattttgtaattagctcatatttagttcttataattagtatccgaacatccaatgtgacatgctaaagtttaaccctggtatccaaatgaagtcttatgagagtttcatcactccggtggtatatgtacttaggctccgttttcttccaccgacttatttttagcacccgtcacattgaatgtttagatactaattagaagtattaaacgtagactatttacaaaatccattacataagacgaatctaaacggcgagacgaatctattaaacctaattagtccatgatttgacaatgtgttgctacagtaaacatttgctaatgatggattaattaggcttaatagattcgtctcgccgtttagcctccacttatgtaatgggttttctaaacaatctacgtttaatactcctaattagtatctaaatattcaatgtgacacgtgctaaaaataagtcagtggaaggaagagaacgtccccttagttttccatcttattaattgtacgatgaaactgtgcagccagatgattgacaatcgcaatacttcaactagtgggccatgcacatcagcgacgtgtaacgtcgtgagttgctgttcccgtagagaaatatcaactggtgggccacgcacatcagcgtcgtgtaacgtggacggaggagccccgtgacggcgtcgacatcgaacggccaccaaccacggaaccacccgtccccacctctcggaagctccgctccacggcgtcgacatctaacggctaccagcaggcgtacgggttggagtggactccttgcctctttgcgctggcggcttccggaaattgcgtggcggagacgaggcgggctcgtctcacacggcacggaagacgtcacgggttccttccccacctctcctcttccccaccgccataaatagccgaccccctcgcctttctccccaatctcatctcgtctcgtgttgttcggagcacaccacccgccccaaatcgttcttcccgcaagcctcggcgatccttcacccgcttcaaggtacggcgatcgtcttcctcctctagatcggcgtgatctgcaagtagttgatttggtagatggttaggatctgtgcactgaagaaatcatgttagatccgcgatgtttctgttcgtagatggctgggaggtggaatttttgtgtagatctgatatgttctcctgtttatcttgtcacgctcctgcgatttgtggggattttaggtcgttgatctgggaatcgtggggttgcttctaggctgttcgtagatgaggtcgttctcacggtttactggatcattgcctagtagatcagctcgggctttcgtctttgtatatggtgcccatacttgcatctatgatctggttccgtggtgttacctaggtttctgcgcctgattcgtccgatcgattttgttagcatgtggtaaacgtttggtcatggtctgatttagattagagtcgaataggatgatctcgatctagctcttgggattaatatgcatgtgtcaccaatctgttccgtggttaagatgatgaatctatgcttagttaatgggtgtagatatatatgctgctgttcctcaatgatgccgtagcttttacctgagcagcatggatcgtcctgttacttaggtagatgcacatgcttatagatcaagatatgtactgctactgttggaattctttagtatacctgatgatcatccatgctcttgttacttgttttggtatacttggatgatggcatgctgctgctttttgttgatttgagcccatccatatctgcatatgtcacatgattaagatgattacgctgtttctgtatgatgccatagcttttatgtgagcaacatgcatcctcctggttatatgcattaatagatggaagatatctattgctacaatttgatgattattttgtacatacgatgatcaagcatgctcttcatactttgttgatatacttggataatgaaatgctgctgcacgttcattctatagcactaatgatgtgatgaacacgcacgacctgtttgtggcatctgtttgaatgtgttgttgctgttcactagagactgttttattaacctactgctagatacttacccttctgtctgtttattcttttgcagccagaatagcggatccgcccatggtcgaacaggacggcctgcatgcaggatcaccagcggcctgggtcgaaagactcttcggctacgactgggcacaacagaccatcgggtgtagcgacgcagctgttttcaggctgtccgcacagggcagacccgttttgttcgtcaaaacagacctgtctggcgcgctcaacgaactgcaagacgaggccgcaagactgagctggcttgctaccacaggcgttccttgtgctgcagtcctcgacgtcgttactgaggctggaagagactggctgctcctgggtgaagtcccaggacaggaccttttgtccagccatctggcacctgccgaaaaggtcagcatcatggcagacgccatgagaaggctgcacacactcgaccctgcaacatgccccttcgatcaccaggcaaaacacaggatcgagcgcgcaagaacgcgcatggaggctggtttggtcgaccaagatgacctcgacgaggaacaccaaggactggctcctgctgaactcttcgccagactcaaggcgagaatgccagacggtgacgacctggtcgtcacacacggcgacgcttgtctcccaaacataatggtcgagaacggacgcttcagcggtttcatcgactgcggtagactcggagtcgctgacagataccaggacatcgccctggcaacacgcgacatcgcagaggaactcggaggcgaatgggctgacaggtttctcgtgctctacggtatcgctgctccagacagccagaggatcgcattctacaggctcctcgacgagttcttttagttcgaacggtacccggggatcctctagtgccgtgggtcgtttaagctgccgctgtacctgtgtcgtctggtgccttctggtgtacctgggaggttgtcgtctatcaagtatctgtggttggtgtcatgagtcagtgagtcccaatactgttcgtgtcctgtgtgcattatacccaaaactgttatgggcaaatcatgaataagcttgatgttcgaacttaaaagtctctgctcaatatggtattatggttgtttttgttcgtctcctaatatttgcctgggatcaaattttattggctggtgttcatttgacctccatgttcttgctaggctccattttttactctacagccataatatgtttgattgtttggtttgttctttgttgtacacctggttctgtcgagcttagttttcgacactggcttacagcttaacatgttgctattttattgggttctgattgctattttattgggttctgattgctagtttttgctgaatccaaaaaccatgttatttatttaagcgatccaggttattattatgatggtggctaagtttttttttttccaagggtaaattttctggattctccagtgtttctgtggccgaattcaatcactagagtcgacctgcatgattccgatgacttcgtaggttcctagctcaagccgctcgtgtccaagcgtcacttacgattagctaatgattacggcatctaggaccgactagctagctagctaagagctcggtaccgagctcgaattcattccgattaatcgtggcctcttgctcttcaggatgaagagctatgtttaaacgtgcaagcgctactagacaattcagtacattaaaaacgtccgcaatgtgttattaagttgtctaagcgtcaatttgtttacaccacaatatatcctgcca

SEQ ID NO: 11 - DNA, 22974 bp, synthetic construct
  source 1..22974: mol_type = other DNA
gtttacccgccaatatatcctgtcaaacactgcggccgcacttgaccgcggatggagccggagctgtggtgaggccatcgacgggaggtgggggagaacacagtctcagtgttctttgtgagtccgcaaggtttttagcttttctgtattaattaaggttgctgttggctgtagaatacggtcgtggaagagctgtatcggtagctactacgtaagctattatatactggaagtctggagctcgtcgatctccggtcgtcttcctccatttctcctcgtcttgctttgactgctgctaccatttgcttctgttttctgatgaagcatgccatgtcggccaccagtgtttgtgtggtttttgcagggaatggctttcaagtgctgtgattgaatggccctcgtcgtcctcggctgagctcacatggacgcgtcatgtgagtgagatatatgatcatatgatgagtggggttcgggtgagtgcgtacttgaagtaggatcccgctttcactcattcattcattggcctttaaaccgggaaattttcgcgaggagatggagggaagcaagcagggtgacgagtgcagagtgccgcgagcgctttgtcaaaaggcaccgccgtaggcaaaaaaatcaatggccctgactgactcgatggtagtactactgtagagactagagagggttgctccccatatcttcgtgtgacttttactccagcattgcatttccgtcattgagacgttaattaatagcagctttcgggacagatgactgtggccatgtttcgtcacggccgcttcgtgccagctgggggtactatagtactgtgattttgttagtaaaaactttcattaggccaccattgacgaccgggccttcgcttttgctgcgctaattaaccatttcccggcgaccgaagggaacatgaacatgccccgacacatgagggcatgaggactagtgttctccctgtcgttcgttgacttgactagtgatagtttaaacgctcttcaactggaagagcggttactaccggttcactagctagctgctaatcgagctagttaccctatgaggtgacatgaagcgctcacggttactatgacggttagcttcacgactgttggtggcagtagcgtacgacttagctatagttccggacttacccttaagataacttcgtatagcatacattatacgaagttatgggcccacgcgtgaagagcggttaccagagctggtcacctttgtccaccaagatggaactgtcttcggccagaatggccatctggattcagcaggcctagaaggccatttatcgctatcaactttgtatagaaaagttgggccgaattcgagctcggtacggccagaatggcccggaccgaagcttgcggccgcacactgatagtttaaactgaaggcgggaaacgacaatctgatcatgagcggagaattaagggagtcacgttatgacccccgccgatgacgcgggacaagccgttttacgtttggaactgacagaaccgcaacgttgaaggagccactcagccgcgggtttctggagtttaatgagctaagcacatacgtcagaaaccattattgcgcgttcaaaagtcgcctaaggtcactatcagctagcaaatatttcttgtcaaaaatgctccactgacgttccataaattcccctcggtatccaattagagtctcatattcactctcccgggggatctcgactctagaggatcgctcaggaaggccgctgagatagaggcatggcggccaatgcgggcggcggtggagcgggaggaggcagcggcagcggcagcgtggctgcgccggcggtgtgccgccccagcggctcgcggtggacgccgacgccggagcagatcaggatgctgaaggagctctactacggctgcggcatccggtcgcccagctcggagcagatccagcgcatcaccgccatgctgcggcagcacggcaagatcgagggcaagaacgtcttctactggttccagaaccacaaggcccgcgagcgccagaagcgccgcctcaccagcctcgacgtcaacgtgcccgccgccggcgcggccgacgccaccaccagccaactcggcgtcctctcgctgtcgtcgccgccgccttcaggcgcggcgcctccctcgcccaccctcggcttctacgccgccggcaatggcggcggatcggctgtgctgctggacacgagttccgactggggcagcagcggcgctgccatggccaccgagacatgcttcctgcaggactacatgggcgtgacggacacgggcagctcgtcgcagtggccacgcttctcgtcgtcggacacgataatggcggcggccgcggcgcgggcggcgacgacgcgggcgcccgagacgctccctctcttcccgacctgcggcgacgacggcggcagcggtagcagcagctacttgccgttctggggtgccgcgtccacaactgccggcgccacttcttccgttgcgatccagcagcaacaccagctgcaggagcagtacagcttttacagcaacagcaacagcacccagctggccggcaccggcaaccaagacgtatcggcaacagcagcagcagccgccgccctggagctgagcctcagctcatggtgctccccttaccctgctgcagggagtatgtgagagcaacgcgagctgccactgctcttcactgatgtctctggaatggaaggaggaggaagtgagcatagcgttggtgcgttgctgtcaagggcgaattcacatggttaaccgacaaagcagcattagtccgttgatcggtggaagaccactcgtcagtgttgagttgaatgtttgatcaataaaatacggcaatgctgtaagggttgttttttatgccattgataatacactgtactgttcagttgttgaactctatttcttagccatgccaagtgcttttcttattttgaataacattacagcaaaaagttgaaagacaaaaaaaaaaacccccgaacagagtgctttgggtcccaagcttctttagactgtgttcggcgttccccctaaatttctccccctatatctcactcacttgtcacatcagcgttctctttccccctatatctccacgctctacagcagttccacctatatcaaacctctataccccaccacaacaatattatatactttcatcttcaactaactcatgtaccttccaatttttttctactaataattatttacgtgcacagaaacttagcaaggagagagagagcgggaatgcggccgccaccgcggtggagctcgaattccggtccgggcctagaaggccagcttcaagtttgtacaaaaaagcaggctccggccagaatctcactgactagctaaacagcggccgcatcgagcagctggcttgtggggaccagacaaaaaaggaatggtgcagaattgttaggcgcacctaccaaaagcatctttgcctttattgcaaagataaagcagattcctctagtacaagtggggaacaaaataacgtggaaaagagctgtcctgacagcccactcactaatgcgtatgacgaacgcagtgacgaccacaaaactcgagcaacgagatcatgagccaatcaaagaggagtgatgtagacctaaagcaataatggagccatgacgtaagggcttacgcccatacgaaataattaaaggctgatgtgacctgtcggtctctcagaacctttactttttatgtttggcgtgtatttttaaatttccacggcaatgacgatgtgaccgtcgacccactaaaacattgctttgtcaaaagctaaaaaagatgatgcccgacagccacttgtgtgaagcatgagaagccggtccctccactaagaaaattagtgaagcatcttccagtggtccctccactcacagctcaatcagtgagcaacaggacgaaggaaatgacgtaagccatgacgtctaatcccagggcccggtgaccaatcgaattagcttggcgcgtggaccgaagcttgcatgcctgcagtgcagcgtgacccggtcgtgcccctctctagagataatgagcattgcatgtctaagttataaaaaattaccacatattttttttgtcacacttgtttgaagtgcagtttatctatctttatacatatatttaaactttactctacgaataatataatctatagtactacaataatatcagtgttttagagaatcatataaatgaacagttagacatggtctaaaggacaattgagtattttgacaacaggactctacagttttatctttttagtgtgcatgtgttctcctttttttttgcaaatagcttcacctatataatacttcatccattttattagtacatccatttagggtttagggttaatggtttttatagactaatttttttagtacatctattttattctattttagcctctaaattaagaaaactaaaactctattttagtttttttatttaataatttagatataaaatagaataaaataaagtgactaaaaattaaacaaataccctttaagaaattaaaaaaactaaggaaacatttttcttgtttcgagtagataatgccagcctgttaaacgccgtcgacgagtctaacggacaccaaccagcgaaccagcagcgtcgcgtcgggccaagcgaagcagacggcacggcatctctgtcgctgcctctggacccctctcgagagttccgctccaccgttggacttgctccgctgtcggcatccagaaattgcgtggcggagcggcagacgtgagccggcacggcaggcggcctcctcctcctctcacggcaccggcagctacgggggattcctttcccaccgctccttcgctttcccttcctcgcccgccgtaataaatagacaccccctccacaccctctttccccaacctcgtgttgttcggagcgcacacacacacaaccagatctcccccaaatccacccgtcggcacctccgcttcaaggtacgccgctcgtcctcccccccccccctctctaccttctctagatcggcgttccggtccatgcatggttagggcccggtagttctacttctgttcatgtttgtgttagatccgtgtttgtgttagatccgtgctgctagcgttcgtacacggatgcgacctgtacgtcagacacgttctgattgctaacttgccagtgtttctctttggggaatcctgggatggctctagccgttccgcagacgggatcgatttcatgattttttttgtttcgttgcatagggtttggtttgcccttttcctttatttcaatatatgccgtgcacttgtttgtcgggtcatcttttcatgcttttttttgtcttggttgtgatgatgtggtctggttgggcggtcgttctagatcggagtagaattctgtttcaaactacctggtggatttattaattttggatctgtatgtgtgtgccatacatattcatagttacgaattgaagatgatggatggaaatatcgatctaggataggtatacatgttgatgcgggttttactgatgcatatacagagatgctttttgttcgcttggttgtgatgatgtggtgtggttgggcggtcgttcattcgttctagatcggagtagaatactgtttcaaactacctggtgtatttattaattttggaactgtatgtgtgtgtcatacatcttcatagttacgagtttaagatggatggaaatatcgatctaggataggtatacatgttgatgtgggttttactgatgcatatacatgatggcatatgcagcatctattcatatgctctaaccttgagtacctatctattataataaacaagtatgttttataattattttgatcttgatatacttggatgatggcatatgcagcagctatatgtggatttttttagcactgccttcatacgctatttatttgcttggtactgtttcttttgtcgatgctcaccctgttgtttggtgttacttctgcaggtcgactttaacttagcctaggatccatggccactgtgaacaactggctcgctttctccctctccccgcaggagctgccgccctcccagacgacggactccacactcatctcggccgccaccgccgaccatgtctccggcgatgtctgcttcaacatcccccaagattggagcatgaggggatcagagctttcggcgctcgtcgcggagccgaagctggaggacttcctcggcggcatctccttctccgagcagcatcacaaggccaactgcaacatgatacccagcactagcagcacagtttgctacgcgagctcaggtgctagcaccggctaccatcaccagctgtaccaccagcccaccagctcagcgctccacttcgcggactccgtaatggtggcttcctcggccggtgtccacgacggcggtgccatgctcagcgcggccgccgctaacggtgtcgctggcgctgccagtgccaacggcggcggcatcgggctgtccatgattaagaactggctgcggagccaaccggcgcccatgcagccgagggtggcggcggctgagggcgcgcaggggctctctttgtccatgaacatggcggggacgacccaaggcgctgctggcatgccacttctcgctggagagcgcgcacgggcgcccgagagtgtatcgacgtcagcacagggtggagccgtcgtcgtcacggcgccgaaggaggatagcggtggcagcggtgttgccggcgctctagtagccgtgagcacggacacgggtggcagcggcggcgcgtcggctgacaacacggcaaggaagacggtggacacgttcgggcagcgcacgtcgatttaccgtggcgtgacaaggcatagatggactgggagatatgaggcacatctttgggataacagttgcagaagggaagggcaaactcgtaagggtcgtcaagtctatttaggtggctatgataaagaggagaaagctgctagggcttatgatcttgctgctctgaagtactggggtgccacaacaacaacaaattttccagtgagtaactacgaaaaggagctcgaggacatgaagcacatgacaaggcaggagtttgtagcgtctctgagaaggaagagcagtggtttctccagaggtgcatccatttacaggggagtgactaggcatcaccaacatggaagatggcaagcacggattggacgagttgcagggaacaaggatctttacttgggcaccttcagcacccaggaggaggcagcggaggcgtacgacatcgcggcgatcaagttccgcggcctcaacgccgtcaccaacttcgacatgagccgctacgacgtgaagagcatcctggacagcagcgccctccccatcggcagcgccgccaagcgcctcaaggaggccgaggccgcagcgtccgcgcagcaccaccacgccggcgtggtgagctacgacgtcggccgcatcgcctcgcagctcggcgacggcggagccctggcggcggcgtacggcgcgcactaccacggcgccgcctggccgaccatcgcgttccagccgggcgccgccagcacaggcctgtaccacccgtacgcgcagcagccaatgcgcggcggcgggtggtgcaagcaggagcaggaccacgcggtgatcgcggccgcgcacagcctgcaggacctccaccacctgaacctgggcgcggccggcgcgcacgactttttctcggcagggcagcaggccgccgccgctgcgatgcacggcctgggtagcatcgacagtgcgtcgctcgagcacagcaccggctccaactccgtcgtctacaacggcggggtcggcgacagcaacggcgccagcgccgtcggcggcagtggcggtggctacatgatgccgatgagcgctgccggagcaaccactacatcggcaatggtgagccacgagcaggtgcatgcacgggcctacgacgaagccaagcaggctgctcagatggggtacgagagctacctggtgaacgcggagaacaatggtggcggaaggatgtctgcatgggggactgtcgtgtctgcagctgcggcggcagcagcaagcagcaacgacaacatggccgccgacgtcgggcatggcggcgcgcagctcttcagtgtctggaacgacactggtggaggcggctcgggtggcggaggctccggaggcggtggctcgacgtgcgccaaggacatccaaaaagcagcagcggaggcggcactcgcctttcaggacgagacctgcgacaccaccaccaccaaccacggcctcgacatggaggagaccatggtcgaagccatctacacccccgagcagagcgagggcgccttctacatggacgaagagacaatgttcggcatgccaaccctcctcgacaacatggccgaaggcatgctgctgccgcccccgagcgtccagtggaaccacaactacgacggcgaaggcgacggggatgtgtccctgtggagctactaggcgtacctagtggtacctgacatcttatagtctgcaacctctcgtgtctgaattcctatctttatcaagtgttattgcttccacgactataggacagctttcgtcgaaagcttttgctcatgtgatctcgaaggattcatctagtctgatttttcgtgacttgtatcggttttattggattcatccaacatatatcaataaaaaatgagttgtgtttcctttcttcctagttcagttaaaattatttccctcctgcgcttgtgctgtaattgtctgtgtacctgttgtttgtgactgtgttagttcccttggatatgatttcgtatttgatatgtacatggagatagcttagcttcattattggagtatgaagttagtatgacatagtcactctcctggaaaattgacactgcaaaccatatttttattctgaaccacaaatcctagtcagtccgctggcatatgccgtccgtttgctgaatccagaacgtgggtttggagatgtacggctgagatgcctctatgcgaaggggatttcgtggtgaaacgagatgggagtagagcaacgcccgtggaagatgcttcaaacttccacacttttgagcaacgatcggcagtagtaaggtagacgatttcaagatcaaagcatatgaagataaacaacatcaacaacaaaatttgttggggttctatagagagaaacagagctacatacatacactgttttgtatctaccatctgagatgatgaaaagatgaaaaactaaagaatgccccggcgccaacgccaggacacgccgcgcgcgcgtcacccgagccatctcttgacccagccggcgctgtatatttacacacgttgcagcatcgatcaccacctgttcgatcgcgtcgccgtcaccggcgcgccgcgacttattgaactagtctagggcgcggctaacaacctagcttagattgccttgtctaaacccttaggctaacgcgccactctagaaggccgatctcccccgaacgcgccagatccgatatcgatgggccctggccgaagcttggtcacccggtccgggcctagaaggccgatctcccgggcacccagctttcttgtacaaagtggccgttaacggatcggccagaatggcccggaccgggttaccccgcggttcaaagccaatgactgttgttaggtccagtttctaaggacgaatcatccaatcactggttctttctgaacaaaacaaagagctatagagttacgttactgtagccgagacagagcctgcaatctggttatgccacatactaggttctttcttaaagttgactcactctatcctaagttctacttacaaggagctacaacaaattggtcataaccggagagcgttcaaggaggtaatatcccatcttactctgtagcaaggctacaaaaggagagctaaagaactaggctacaaaaagagagctaaagaactaactatctagcaagactacagagctatagtgtagagatttcataaccggtgagcgttcaaggatactttgaagagaagaggtaatatctcaactagcaagactacaaaaaaatggagatataaaactaactgtctaacaagactacagagctatagtagagatagatacgttcgacacttaagcatgagaattcgagctcggtaccctggttcacaaactcaatacaacacacagtggagtagggtattacgctccggcggcccgaaccactctaaatccttgtgtcctcgtgtgctcttccaccattaatgactgtaattgcagggacacgaagagttgtagcgcttttgccaacaagatccgctatatgctagtagagtggaacctgcacagcaacaagcatccaataatctgagaataagaattatgtgtggtgatggttctcatctctgcaactcgccattttcgcgagagaaccaaatccaagttggtgaagatcatgatttgggctcatgggctggcatagtagctattacctttgcaattgtggttcgaatctatccgatattctccttttcagggagagctaatgcttatgcttattgggtattttggtttgacactgcttcacgcccaaaaaaaggcaactatgtctgagttggatatggcccaaaaaaaggcagctatgtctgagttggatatggaagtcttctttcgtttagggtgaagtaagaccaagctcatgagcttattatcttaggtcggaacaaattagttgataggcatggcacatttatcaaattataatgattttaacagaaaagcaacacctctttttcagcagcaccagctttgcaagctgcaattgacactccaagcatagtatttgctccaaactcagcctgcatttcgcacaatatcatatctatttccatttggataaaatatattttccagaaatatgggaacagaatcaagatacagaaaaaagttgtggtagtagtggtaagtggaaacacaagtacagtgaaaagatagcattatttctgaacagtcaaattaaccgaaataagtagtatcacatactgcccctaaattgactacacccaatgtaaagaattgcttgagcatattgagccatcagttgtttgtttgtgtaacggatttgacaatgcagagttcaggagcaaaaaaccgcaaaggagagaaagagggaaaggatctcctagtatcccaccttgtggcgcgccctgtcaagtgcatgatggcctggtcgatctgcgtctgctgctgcggttccatcccaacgagtgcctccgacaccttgtcgttgatcacccgcaccgcgtaggcgacccccctggcgaggaacttccgcctctcggaggccccggccgcgtcggcggcggcgccctcgagcgcgcccacgctagccgtagatgctcggtgcacggccttgttggtgtgcaactcgacctcaacggccggtgcgctacgcccgtcaaggatctggcgcgcccgcaccctcgtgatcacggtgggcgcctcccgcctcatgtggccgacgatgaaaagcgccgggttaggggccttggcgcgcaccgccgtattcagggcctcctcgctcttgcgcgagagcaggtgcttccccaggtactcctgcactgacaaggctgccacagcggtggaatttgtcctcacgacttcgccacgtcgtcctcacctccctggcttcccacgactccgccgtatcgaggtgctcggtgggtcgtcttaatccgaagtccgaactaggaagacgagacagagaggtctgaggaatgggcctcgtttgatgttgagctgaattatttttccagcataagcccaggtcttggtccatgaacaaaattactagaaacccagcccagtactacgatctaaaagagggactgccactggatagctctctctagcattctccacgctccaatacagcggcgtcgtgtctatccgggtctatccgcgaacacgtgagaactctccagaaactgctttctcctccacttcatctctctcgctttccctctataaaaagaccccttctaggaattgagggagacagcaagcaccaagcagcgatccgaagctcaatcaattcactcaaacctcttccccaaatcttcgattagatcttcgttgacaagaagactagaaccgaacctgacatgtccaacctgctcacggttcaccagaaccttccggctcttccagtggacgcgacgtccgatgaagtcaggaagaacctcatggacatgttccgcgacaggcaagcgttcagcgagcacacctggaagatgctgctctccgtctgccgctcctgggctgcatggtgcaagctgaacaacaggaagtggttccccgctgagcccgaggacgtgagggattaccttctgtacctgcaagcgcgaggtttgtttctgcttctacctttgatatatatataataattatcattaattagtagtaatataatatttcaaatatttttttcaaaataaaagaatgtagtatatagcaattgcttttctgtagtttataagtgtgtatattttaatttataacttttctaatatatgaccaaaacatggtgatgcctaggtctggcagtgaagaccatccagcaacaccttggacaactgaacatgcttcacaggcgctccggcctcccgcgccccagcgactcgaacgccgtgagcctcgtcatgcgccgcatcaggaaggaaaacgtcgatgccggcgaaagggcaaagcaggccctcgcgttcgagaggaccgatttcgaccaggtccgcagcctgatggagaacagcgacaggtgccaggacattaggaacctggcgttcctcggaattgcatacaacacgctcctcaggatcgcggaaattgcccgcattcgcgtgaaggacattagccgcaccgacggcggcaggatgcttatccacattggcaggaccaagacgctcgtttccaccgcaggcgtcgaaaaggccctcagcctcggagtgaccaagctcgtcgaacgctggatctccgtgtccggcgtcgcggacgacccaaacaactacctcttctgccgcgtccgcaagaacggggtggctgcccctagcgccaccagccaactcagcacgagggccttggaaggtattttcgaggccacccaccgcctgatctacggcgcgaaggatgacagcggtcaacgctacctcgcatggtccgggcactccgcccgcgttggagctgctagggacatggcccgcgccggtgtttccatccccgaaatcatgcaggcgggtggatggacgaacgtgaacattgtcatgaactacattcgcaaccttgacagcgagacgggcgcaatggttcgcctcctggaagatggtgactgaggtacccaacctagacttgtccatcttctggattggccaacttaattaatgtatgaaataaaaggatgcacacatagtgacatgctaatcactataatgtgggcatcaaagttgtgtgttatgtgtaattactagttatctgaataaaagagaaagagatcatccatatttcttatcctaaatgaatgtcacgtgtctttataattctttgatgaaccagatgcatttcattaaccaaatccatatacatataaatattaatcatatataattaatatcaattgggttagcaaaacaaatctagtctaggtgtgttttgcgatccgatatcgaattggccacggtaccagctgctgctgttctagggttcacaagtctgcctatttgtcttccccaatggagctatggttgtctggtctggtccttggtcgtgtcccgtttcattgtgtactatttacctgtaatgtgtatccttaagtctggtttgatggtgtctgaaacgttttgctgtggtagagcagcatggaagaactataatgaataagtgatccctaatcattgtgtccaaattttgcttctgctatacccttttgtgctgtttcttatgttttgcttaaaaatttgatctgacaaacaaatttgtctaaattatgctcttgttctgactgtgtactgtacacatttgtattgctaccggtttggcacatagttttctctttgattgcagatcaaacccttctgattgcagattgcttggctatggctgatgtgctcactgttcttctttagcttgtatattgctgatggtggcttggctacggctgaaaaagttgctgctgcgccgacttggcaactgttgctccagtaatgctttgtcctctcttcctagccgccgacttggcacttggcagctgttgctcctgtaatgcgttgttatctcttatctcttgagatgtactatgattttgaggctgtttgacttgtgccagattgccagtgctgatgctatattatctcaggtttttatgctagtatatgttttactgtgtgctgcctgtgtcgagttacgtaatctattgaaccgctatgcgtgttgatgccctgttgttgcttgccagattgatgcccctgttgcttgcagcttgcaagctgtagtgaaatcctaaaattccaaaccaaatctattctgaacttttgaagatctgtgatgtccggaagaaaagattcaaacagataaacgggactctccagaatctataaaataaatgatcgacaaacgctttgctttggtaggcttcaagcttggtcacccggtccgggcctagaaggccagcttcggccgccccgggcaactttattatacaaagttgatagataaatcagatatctggttcctaaggacccggcggaccgattaaactgattcggtccgacgcgttacctaataacttcgtatagcatacattatacgaagttattagctaactaactagtaagcgtacacctgagcggttaccgaattcctgcccttaaggccaattgttcaagattcattcaacaattgaaacatctcccatgattaaatcagtataaggttgctatggtcttgcttgacaaagtttttttttgagggaatttcaactaaatttttgagtgaaactatcaaatactgattttaaaaaatttttataaaaggaagcgcagagataaaaggccatctatgctacaaaagtacccaaaaatgtaatcctaaagtatgaattgcattttttttttgtttggacgaaaggaaaggagtattaccacaagaatgatatcatcttcatatttagatcttttttgggtaaagcttgagattctctaaatatagagaaatcagaagaaaaaaaaaccgtgttttggtggttttgatttctagcctccacaataactttgacggcgtcgacaagtctaacggacaccaagcagcgaaccaccagcgccgagccaagcgaagcagacggccgagacgttgacaccttcggcgcggcatctctcgagagttccgctccggcgctccacctccaccgctggcggtttcttattccgttccgttccgcctcctgctctgctcctctccacaccacacggcacgaaaccgttacggcaccggcagcacccagcacgggagaggggattcctttcccaccgttccttccctttccgccccgccgctataaatagccagccccatccccagcttttttccccaatctcatctcctctctcctgttgttcggagcacacgcacaatccgatcgatccccaaatccccttcgtctctcctcgcgagcctcgtggatcccagcttcaaggtacggcgatcgatcatcccccctccttctctctaccttcttttctctagactacatcggatggcgatccatggttagggcctgctagtttcccttcctgttttgtcgatggctgcgaggcacaatagatctgatggcgttatgacggctaacttgtcatgttgttgcgatttatagtccctttaggagatcagtttaatttctcggatggttcgagatcggtggtccatggttagtaccctaagatccgcgctgttagggttcgtagatggaggcgacctgttctgattgttaacttgtcagtacctgggaaatcctgggatggttctagctcgtccgcagatgagatcgatttcatgatcctctgtatcttgtttcgttgcctaggttccgtctaatctatccgtggtatgatgtagatgttttgatcgtgctaactacgtcttgtaaagttaattgtcaggtcataatttttagcatgcctttttttttgtttggttttgtctaattgggctgtcgttctagatcagagtagaagactgttccaaactacctgctggatttattgaacttggatctgtatgtgtgtcacatatcttcataaattcatgattaagatggattgaaatatcttttatctttttggtatggatagttctatatgttggtgtggctttgttagatgtatacatgcttagatacatgaagcaacgtgctgctactgtttagtaattgctgttcatttgtctaataaacagataaggatatgtatttatgttgctgttggttttgctggtactttgttggatacaaatgcttcaatacagaaaacagcatgctgctacgatttaccatttatctaatcttatcatatgtctaatctaataaacaaacatgcttttaaattatcttcatatgcttggatgatggcatacacagcggctatgtgtggttttttaaatacccagcatcatgggcatgcatgacactgctttaatatgctttttatttgcttgagactgtttcttttgtttatactgaccctttagttcggtgactcttctgcaggtcgactttaacttagcctaggatccatggcccagtccaagcacggcctgaccaaggagatgaccatgaagtaccgcatggagggctgcgtggacggccacaagttcgtgatcaccggcgagggcatcggctaccccttcaagggcaagcaggccatcaacctgtgcgtggtggagggcggccccttgcccttcgccgaggacatcttgtccgccgccttcatgtacggcaaccgcgtgttcaccgagtacccccaggacatcgtcgactacttcaagaactcctgccccgccggctacacctgggaccgctccttcctgttcgaggacggcgccgtgtgcatctgcaacgccgacatcaccgtgagcgtggaggagaactgcatgtaccacgagtccaagttctacggcgtgaacttccccgccgacggccccgtgatgaagaagatgaccgacaactgggagccctcctgcgagaagatcatccccgtgcccaagcagggcatcttgaagggcgacgtgagcatgtacctgctgctgaaggacggtggccgcttgcgctgccagttcgacaccgtgtacaaggccaagtccgtgccccgcaagatgcccgactggcacttcatccagcacaagctgacccgcgaggaccgcagcgacgccaagaaccagaagtggcacctgaccgagcacgccatcgcctccggctccgccttgccctccggactcagatctcgatagggtaccaatggccagttaacagatccagctgctgctgttctagggttcacaagtctgcctatttgtcttccccaatggagctatggttgtctggtctggtccttggtcgtgtcccgtttcattgtgtactatttacctgtaatgtgtatccttaagtctggtttgatggtgtctgaaacgttttgctgtggtagagcagcatggaagaactataatgaataagtgatccctaatcattgtgtccaaattttgcttctgctatacccttttgtgctgtttcttatgttttgcttaaaaatttgatctgacaaacaaatttgtctaaattatgctcttgttctgactgtgtactgtacacatttgtattgctaccggtttggcacatagttttctctttgattgcagatcaaacccttctgattgcagattgcttggctatggctgatgtgctcactgttcttctttagcttgtatattgctgatggtggcttggctacggctgaaaaagttgctgctgcgccgacttggcaactgttgctccagtaatgctttgtcctctcttcctagccgccgacttggcacttggcagctgttgctcctgtaatgcgttgttatctcttatctcttgagatgtactatgattttgaggctgtttgacttgtgccagattgccagtgctgatgctatattatctcaggtttttatgctagtatatgttttactgtgtgctgcctgtgtcgagttacgtaatctattgaaccgctatgcgtgttgatgccctgttgttgcttgccagattgatgcccctgttgcttgcagcttgcaagctgtagtgaaatcctaaaattcgaaaccaaatctattctgaacttttgaagatctgtgatgtccggaagaaaagattcaaacagataaacgggactctccagaatctataaaataaatgatcgacaaacgctttgctttggtaggcttcctagttagttagcggaccgaagcttcggtccgggcctgcggccgcagatatcagaacctgcgtctggacgcacaagtcatagcattatcggctaaaatttcttaatttctaaattagtcatatcggctaagaaagtggggagcactatcatttcgtagaacaagaacaaggtatcatatatatatatatatataatatttaaactttgttaagtggaatcaaagtgctagtattaatggagtttcatgtgcattaaattttatgtcacatcagcaattttgttgacttggcaaggtcatttagggtgtgtttggaagacaggggctattaggagtattaaacatagtctaattacaaaactaattgcacaaccgctaagctgaatcgcgagatggatctattaagcttaattagtccatgatttgacaatgtggtgctacaataaccatttgctaatgatggattacttaggtttaatagattcgtctcgtgatttagcctatgggttctgctattaattttgtaattagctcatatttagttcttataattagtatccgaacatccaatgtgacatgctaaagtttaaccctggtatccaaatgaagtcttatgagagtttcatcactccggtggtatatgtacttaggctccgttttcttccaccgacttatttttagcacccgtcacattgaatgtttagatactaattagaagtattaaacgtagactatttacaaaatccattacataagacgaatctaaacggcgagacgaatctattaaacctaattagtccatgatttgacaatgtgttgctacagtaaacatttgctaatgatggattaattaggcttaatagattcgtctcgccgtttagcctccacttatgtaatgggttttctaaacaatctacgtttaatactcctaattagtatctaaatattcaatgtgacacgtgctaaaaataagtcagtggaaggaagagaacgtccccttagttttccatcttattaattgtacgatgaaactgtgcagccagatgattgacaatcgcaatacttcaactagtgggccatgcacatcagcgacgtgtaacgtcgtgagttgctgttcccgtagagaaatatcaactggtgggccacgcacatcagcgtcgtgtaacgtggacggaggagccccgtgacggcgtcgacatcgaacggccaccaaccacggaaccacccgtccccacctctcggaagctccgctccacggcgtcgacatctaacggctaccagcaggcgtacgggttggagtggactccttgcctctttgcgctggcggcttccggaaattgcgtggcggagacgaggcgggctcgtctcacacggcacggaagacgtcacgggttccttccccacctctcctcttccccaccgccataaatagccgaccccctcgcctttctccccaatctcatctcgtctcgtgttgttcggagcacaccacccgccccaaatcgttcttcccgcaagcctcggcgatccttcacccgcttcaaggtacggcgatcgtcttcctcctctagatcggcgtgatctgcaagtagttgatttggtagatggttaggatctgtgcactgaagaaatcatgttagatccgcgatgtttctgttcgtagatggctgggaggtggaatttttgtgtagatctgatatgttctcctgtttatcttgtcacgctcctgcgatttgtggggattttaggtcgttgatctgggaatcgtggggttgcttctaggctgttcgtagatgaggtcgttctcacggtttactggatcattgcctagtagatcagctcgggctttcgtctttgtatatggtgcccatacttgcatctatgatctggttccgtggtgttacctaggtttctgcgcctgattcgtccgatcgattttgttagcatgtggtaaacgtttggtcatggtctgatttagattagagtcgaataggatgatctcgatctagctcttgggattaatatgcatgtgtcaccaatctgttccgtggttaagatgatgaatctatgcttagttaatgggtgtagatatatatgctgctgttcctcaatgatgccgtagcttttacctgagcagcatggatcgtcctgttacttaggtagatgcacatgcttatagatcaagatatgtactgctactgttggaattctttagtatacctgatgatcatccatgctcttgttacttgttttggtatacttggatgatggcatgctgctgctttttgttgatttgagcccatccatatctgcatatgtcacatgattaagatgattacgctgtttctgtatgatgccatagcttttatgtgagcaacatgcatcctcctggttatatgcattaatagatggaagatatctattgctacaatttgatgattattttgtacatacgatgatcaagcatgctcttcatactttgttgatatacttggataatgaaatgctgctgcacgttcattctatagcactaatgatgtgatgaacacgcacgacctgtttgtggcatctgtttgaatgtgttgttgctgttcactagagactgttttattaacctactgctagatacttacccttctgtctgtttattcttttgcagccagaatagcggatccgcccatggtcgaacaggacggcctgcatgcaggatcaccagcggcctgggtcgaaagactcttcggctacgactgggcacaacagaccatcgggtgtagcgacgcagctgttttcaggctgtccgcacagggcagacccgttttgttcgtcaaaacagacctgtctggcgcgctcaacgaactgcaagacgaggccgcaagactgagctggcttgctaccacaggcgttccttgtgctgcagtcctcgacgtcgttactgaggctggaagagactggctgctcctgggtgaagtcccaggacaggaccttttgtccagccatctggcacctgccgaaaaggtcagcatcatggcagacgccatgagaaggctgcacacactcgaccctgcaacatgccccttcgatcaccaggcaaaacacaggatcgagcgcgcaagaacgcgcatggaggctggtttggtcgaccaagatgacctcgacgaggaacaccaaggactggctcctgctgaactcttcgccagactcaaggcgagaatgccagacggtgacgacctggtcgtcacacacggcgacgcttgtctcccaaacataatggtcgagaacggacgcttcagcggtttcatcgactgcggtagactcggagtcgctgacagataccaggacatcgccctggcaacacgcgacatcgcagaggaactcggaggcgaatgggctgacaggtttctcgtgctctacggtatcgctgctccagacagccagaggatcgcattctacaggctcctcgacgagttcttttagttcgaacggtacccggggatcctctagtgccgtgggtcgtttaagctgccgctgtacctgtgtcgtctggtgccttctggtgtacctgggaggttgtcgtctatcaagtatctgtggttggtgtcatgagtcagtgagtcccaatactgttcgtgtcctgtgtgcattatacccaaaactgttatgggcaaatcatgaataagcttgatgttcgaacttaaaagtctctgctcaatatggtattatggttgtttttgttcgtctcctaatatttgcctgggatcaaattttattggctggtgttcatttgacctccatgttcttgctaggctccattttttactctacagccataatatgtttgattgtttggtttgttctttgttgtacacctggttctgtcgagcttagttttcgacactggcttacagcttaacatgttgctattttattgggttctgattgctattttattgggttctgattgctagtttttgctgaatccaaaaaccatgttatttatttaagcgatccaggttattattatgatggtggctaagtttttttttttccaagggtaaattttctggattctccagtgtttctgtggccgaattcaatcactagagtcgacctgcatgattccgatgacttcgtaggttcctagctcaagccgctcgtgtccaagcgtcacttacgattagctaatgattacggcatctaggaccgactagctagctagctaagagctcggtaccgagctcgaattcattccgattaatcgtggcctcttgctcttcaggatgaagagctatgtttaaacgtgcaagcgctactagacaattcagtacattaaaaacgtccgcaatgtgttattaagttgtctaagcgtcaatttgtttacaccacaatatatcctgcca

SEQ ID NO: 12 - DNA, 1682 bp, Oryza sativa
  source 1..1682: mol_type = other DNA
atccctcagccgcctttcactatcttttttgcccgagtcattgtcatgtgaaccttggcatgtataatcggtgaattgcgtcgattttcctcttataggtgggccaatgaatccgtgtgatcgcgtctgattggctagagatatgtttcttccttgttggatgtattttcatacataatcatatgcatacaaatatttcattacactttatagaaatggtcagtaataaaccctatcactatgtctggtgtttcattttatttgcttttaaacgaaaattgacttcctgattcaatatttaaggatcgtcaacggtgtgcagttactaaattctggtttgtaggaactatagtaaactattcaagtcttcacttattgtgcactcacctctcgccacatcaccacagatgttattcacgtcttaaatttgaactacacatcatattgacacaatattttttttaaataagcgattaaaacctagcctctatgtcaacaatggtgtacataaccagcgaagtttagggagtaaaaaacatcgccttacacaaagttcgctttaaaaaataaagagtaaattttactttggaccacccttcaaccaatgtttcactttagaacgagtaattttattattgtcactttggaccaccctcaaatcttttttccatctacatccaatttatcatgtcaaagaaatggtctacatacagctaaggagatttatcgacgaatagtagctagcatactcgaggtcattcatatgcttgagaagagagtcgggatagtccaaaataaaacaaaggtaagattacctggtcaaaagtgaaaacatcagttaaaaggtggtataaagtaaaatatcggtaataaaaggtggcccaaagtgaaatttactcttttctactattataaaaattgaggatgtttttgtcggtactttgatacgtcatttttgtatgaattggtttttaagtttattcgcttttggaaatgcatatctgtatttgagtcgggttttaagttcgtttgcttttgtaaatacagagggatttgtataagaaatatctttaaaaaaacccatatgctaatttgacataatttttgagaaaaatatatattcaggcgaattctcacaatgaacaataataagattaaaatagctttcccccgttgcagcgcatgggtattttttctagtaaaaataaaagataaacttagactcaaaacatttacaaaaacaacccctaaagttcctaaagcccaaagtgctatccacgatccatagcaagcccagcccaacccaacccaacccaacccaccccagtccagccaactggacaatagtctccacacccccccactatcaccgtgagttgtccgcacgcaccgcacgtctcgcagccaaaaaaaaaaaaagaaagaaaaaaaagaaaaagaaaaaacagcaggtgggtccgggtcgtgggggccggaaacgcgaggaggatcgcgagccagcgacgaggccggccctccctccgcttccaaagaaacgccccccatcgccactatatacatacccccccctctcctcccatccccccaaccctaccaccaccaccaccaccacctccacctcctcccccctcgctgccggacgacgagctcctcccccctccccctccgccgccgccgcgccg

SEQ ID NO: 13 - DNA, 978 bp, Zea mays
  source 1..978: mol_type = other DNA
gtgcagcgtgacccggtcgtgcccctctctagagataatgagcattgcatgtctaagttataaaaaattaccacatattttttttgtcacacttgtttgaagtgcagtttatctatctttatacatatatttaaactttactctacgaataatataatctatagtactacaataatatcagtgttttagagaatcatataaatgaacagttagacatggtctaaaggacaattgagtattttgacaacaggactctacagttttatctttttagtgtgcatgtgttctcctttttttttgcaaatagcttcacctatataatacttcatccattttattagtacatccatttagggtttagggttaatggtttttatagactaatttttttagtacatctattttattctattttagcctctaaattaagaaaactaaaactctattttagtttttttatttaataatttagatataaaatagaataaaataaagtgactaaaaattaaacaaataccctttaagaaattaaaaaaactaaggaaacatttttcttgtttcgagtagataatgccagcctgttaaacgccgtcgacgagtctaacggacaccaaccagcgaaccagcagcgtcgcgtcgggccaagcgaagcagacggcacggcatctctgtcgctgcctctggacccctctcgagagttccgctccaccgttggacttgctccgctgtcggcatccagaaattgcgtggcggagcggcagacgtgagccggcacggcaggcggcctcctcctcctctcacggcaccggcagctacgggggattcctttcccaccgctccttcgctttcccttcctcgcccgccgtaataaatagacaccccctccacaccctctttccccaacctcgtgttgttcggagcgcacacacacacaaccagatctcccccaaatccacccgtcggcacctccgcttcaag

SEQ ID NO: 14 - DNA, 2133 bp, Zea mays
  source 1..2133: mol_type = other DNA
atggccactgtgaacaactggctcgctttctccctctccccgcaggagctgccgccctcccagacgacggactccacactcatctcggccgccaccgccgaccatgtctccggcgatgtctgcttcaacatcccccaagattggagcatgaggggatcagagctttcggcgctcgtcgcggagccgaagctggaggacttcctcggcggcatctccttctccgagcagcatcacaaggccaactgcaacatgatacccagcactagcagcacagtttgctacgcgagctcaggtgctagcaccggctaccatcaccagctgtaccaccagcccaccagctcagcgctccacttcgcggactccgtaatggtggcttcctcggccggtgtccacgacggcggtgccatgctcagcgcggccgccgctaacggtgtcgctggcgctgccagtgccaacggcggcggcatcgggctgtccatgattaagaactggctgcggagccaaccggcgcccatgcagccgagggtggcggcggctgagggcgcgcaggggctctctttgtccatgaacatggcggggacgacccaaggcgctgctggcatgccacttctcgctggagagcgcgcacgggcgcccgagagtgtatcgacgtcagcacagggtggagccgtcgtcgtcacggcgccgaaggaggatagcggtggcagcggtgttgccggcgctctagtagccgtgagcacggacacgggtggcagcggcggcgcgtcggctgacaacacggcaaggaagacggtggacacgttcgggcagcgcacgtcgatttaccgtggcgtgacaaggcatagatggactgggagatatgaggcacatctttgggataacagttgcagaagggaagggcaaactcgtaagggtcgtcaagtctatttaggtggctatgataaagaggagaaagctgctagggcttatgatcttgctgctctgaagtactggggtgccacaacaacaacaaattttccagtgagtaactacgaaaaggagctcgaggacatgaagcacatgacaaggcaggagtttgtagcgtctctgagaaggaagagcagtggtttctccagaggtgcatccatttacaggggagtgactaggcatcaccaacatggaagatggcaagcacggattggacgagttgcagggaacaaggatctttacttgggcaccttcagcacccaggaggaggcagcggaggcgtacgacatcgcggcgatcaagttccgcggcctcaacgccgtcaccaacttcgacatgagccgctacgacgtgaagagcatcctggacagcagcgccctccccatcggcagcgccgccaagcgcctcaaggaggccgaggccgcagcgtccgcgcagcaccaccacgccggcgtggtgagctacgacgtcggccgcatcgcctcgcagctcggcgacggcggagccctggcggcggcgtacggcgcgcactaccacggcgccgcctggccgaccatcgcgttccagccgggcgccgccagcacaggcctgtaccacccgtacgcgcagcagccaatgcgcggcggcgggtggtgcaagcaggagcaggaccacgcggtgatcgcggccgcgcacagcctgcaggacctccaccacctgaacctgggcgcggccggcgcgcacgactttttctcggcagggcagcaggccgccgccgctgcgatgcacggcctgggtagcatcgacagtgcgtcgctcgagcacagcaccggctccaactccgtcgtctacaacggcggggtcggcgacagcaacggcgccagcgccgtcggcggcagtggcggtggctacatgatgccgatgagcgctgccggagcaaccactacatcggcaatggtgagccacgagcaggtgcatgcacgggcctacgacgaagccaagcaggctgctcagatggggtacgagagctacctggtgaacgcggagaacaatggtggcggaaggatgtctgcatgggggactgtcgtgtctgcagccgcggcggcagcagcaagcagcaacgacaacatggccgccgacgtcgggcatggcggcgcgcagctcttcagtgtctggaacgacacttaa

SEQ ID NO: 15 - protein, 710 aa, Zea mays
MATVNNWLAFSLSPQELPPSQTTDSTLISAATADHVSGDVCFNIPQDWSMRGSELSALVAEPKLEDFLGGISFSEQHHKANCNMIPSTSSTVCYASSGASTGYHHQLYHQPTSSALHFADSVMVASSAGVHDGGAMLSAAAANGVAGAASANGGGIGLSMIKNWLRSQPAPMQPRVAAAEGAQGLSLSMNMAGTTQGAAGMPLLAGERARAPESVSTSAQGGAVVVTAPKEDSGGSGVAGALVAVSTDTGGSGGASADNTARKTVDTFGQRTSIYRGVTRHRWTGRYEAHLWDNSCRREGQTRKGRQVYLGGYDKEEKAARAYDLAALKYWGATTTTNFPVSNYEKELEDMKHMTRQEFVASLRRKSSGFSRGASIYRGVTRHHQHGRWQARIGRVAGNKDLYLGTFSTQEEAAEAYDIAAIKFRGLNAVTNFDMSRYDVKSILDSSALPIGSAAKRLKEAEAAASAQHHHAGVVSYDVGRIASQLGDGGALAAAYGAHYHGAAWPTIAFQPGAASTGLYHPYAQQPMRGGGWCKQEQDHAVIAAAHSLQDLHHLNLGAAGAHDFFSAGQQAAAAAMHGLGSIDSASLEHSTGSNSVVYNGGVGDSNGASAVGGSGGGYMMPMSAAGATTTSAMVSHEQVHARAYDEAKQAAQMGYESYLVNAENNGGGRMSAWGTVVSAAAAAAASSNDNMAADVGHGGAQLFSVWNDT

SEQ ID NO: 16 - DNA, 30 bp, Zea mays
  source 1..30: mol_type = other DNA
gctgagcccaagctcgaagactttctgggt

SEQ ID NO: 17 - protein, 10 aa, Zea mays
AEPKLEDFLG

SEQ ID NO: 18 - DNA, 48 bp, Zea mays
  source 1..48: mol_type = other DNA
attggcctctcgatgatcaagaattggctccgctcccagcccgctccg

SEQ ID NO: 19 - protein, 16 aa, Zea mays
IGLSMIKNWLRSQPAP

SEQ ID NO: 20 - DNA, 1215 bp, Zea mays
  source 1..1215: mol_type = other DNA
gacacgttcgggcagcgcacgtcgatttaccgtggcgtgacaaggcatagatggactgggagatatgaggcacatctttgggataacagttgcagaagggaagggcaaactcgtaagggtcgtcaagtctatttaggtggctatgataaagaggagaaagctgctagggcttatgatcttgctgctctgaagtactggggtgccacaacaacaacaaattttccagtgagtaactacgaaaaggagctcgaggacatgaagcacatgacaaggcaggagtttgtagcgtctctgagaaggaagagcagtggtttctccagaggtgcatccatttacaggggagtgactaggcatcaccaacatggaagatggcaagcacggattggacgagttgcagggaacaaggatctttacttgggcaccttcagcacccaggaggaggcagcggaggcgtacgacatcgcggcgatcaagttccgcggcctcaacgccgtcaccaacttcgacatgagccgctacgacgtgaagagcatcctggacagcagcgccctccccatcggcagcgccgccaagcgcctcaaggaggccgaggccgcagcgtccgcgcagcaccaccacgccggcgtggtgagctacgacgtcggccgcatcgcctcgcagctcggcgacggcggagccctggcggcggcgtacggcgcgcactaccacggcgccgcctggccgaccatcgcgttccagccgggcgccgccagcacaggcctgtaccacccgtacgcgcagcagccaatgcgcggcggcgggtggtgcaagcaggagcaggaccacgcggtgatcgcggccgcgcacagcctgcaggacctccaccacctgaacctgggcgcggccggcgcgcacgactttttctcggcagggcagcaggccgccgccgctgcgatgcacggcctgggtagcatcgacagtgcgtcgctcgagcacagcaccggctccaactccgtcgtctacaacggcggggtcggcgacagcaacggcgccagcgccgtcggcggcagtggcggtggctacatgatgccgatgagcgctgccggagcaaccactacatcggcaatggtgagccacgagcaggtgcatgcacgggcctacgacgaagccaagcaggctgctcagatggggtacgagagctacctggtgaacgcggagaacaatggtggcggataa

SEQ ID NO: 21 - protein, 405 aa, Zea mays
MDTFGQRTSIYRGVTRHRWTGRYEAHLWDNSCRREGQTRKGRQVYLGGYDKEEKAARAYDLAALKYWGATTTTNFPVSNYEKELEDMKHMTRQEFVASLRRKSSGFSRGASIYRGVTRHHQHGRWQARIGRVAGNKDLYLGTFSTQEEAAEAYDIAAIKFRGLNAVTNFDMSRYDVKSILDSSALPIGSAAKRLKEAEAAASAQHHHAGVVSYDVGRIASQLGDGGALAAAYGAHYHGAAWPTIAFQPGAASTGLYHPYAQQPMRGGGWCKQEQDHAVIAAAHSLQDLHHLNLGAAGAHDFFSAGQQAAAAAMHGLGSIDSASLEHSTGSNSVVYNGGVGDSNGASAVGGSGGGYMMPMSAAGATTTSAMVSHEQVHARAYDEAKQAAQMGYESYLVNAENNGGG

SEQ ID NO: 22 - protein, 679 aa, Zea mays
MASANNWLGFSLSGQDNPQPNQDSSPAAGIDISGASDFYGLPTQQGSDGHLGVPGLRDDHASYGIMEAYNRVPQETQDWNMRGLDYNGGGSELSMLVGSSGGGGGNGKRAVEDSEPKLEDFLGGNSFVSDQDQSGGYLFSGVPIASSANSNSGSNTMELSMIKTWLRNNQVAQPQPPAPHQPQPEEMSTDASGSSFGCSDSMGRNSMVAAGGSSQSLALSMSTGSHLPMVVPSGAASGAASESTSSENKRASGAMDSPGSAVEAVPRKSIDTFGQRTSIYRGVTRHRWTGRYEAHLWDNSCRREGQSRKGRQVYLGGYDKEDKAARAYDLAALKYWGTTTTTNFPISNYEKELEEMKHMTRQEYIAYLRRNSSGFSRGASKYRGVTRHHQHGRWQARIGRVAGNKDLYLGTFSTEEEAAEAYDIAAIKFRGLNAVTNFDMSRYDVKSILESSTLPVGGAARRLKDAVDHVEAGATIWRADMDGAVISQLAEAGMGGYASYGHHGWPTIAFQQPSPLSVHYPYGQPSRGWCKPEQDAAAAAAHSLQDLQQLHLGSAAHNFFQASSSSTVYNGGAGASGGYQGLGGGSSFLMPSSTVVAAADQGHSSTANQGSTCSYGDDHQEGKLIGYDAAMVATAAGGDPYAAARNGYQFSQGSGSTVSIARANGYANNWSSPFNNGMG

SEQ ID NO: 23 - protein, 8 aa, Zea mays
PKLEDFLG

SEQ ID NO: 24 - protein, 14 aa, Zea mays
MELSMIKTWLRNNQ

SEQ ID NO: 25 - protein, 374 aa, Zea mays
IDTFGQRTSIYRGVTRHRWTGRYEAHLWDNSCRREGQSRKGRQVYLGGYDKEDKAARAYDLAALKYWGTTTTTNFPISNYEKELEEMKHMTRQEYIAYLRRNSSGFSRGASKYRGVTRHHQHGRWQARIGRVAGNKDLYLGTFSTEEEAAEAYDIAAIKFRGLNAVTNFDMSRYDVKSILESSTLPVGGAARRLKDAVDHVEAGATIWRADMDGAVISQLAEAGMGGYASYGHHGWPTIAFQQPSPLSVHYPYGQPSRGWCKPEQDAAAAAAHSLQDLQQLHLGSAAHNFFQASSSSTVYNGGAGASGGYQGLGGGSSFLMPSSTVVAAADQGHSSTANQGSTCSYGDDHQEGKLIGYDAAMVATAAGGDPYAA

SEQ ID NO: 26 - protein, 703 aa, Sorghum bicolor
MATVNNWLAFSLSPQELPPTQTDSTLISAATTDDVSGDVCFNIPQDWSMRGSELSALVAEPKLEDFLGGISFSEQHHKANCNMIPSTSSTACYASSGATAGYHHQLYHQPTSSALHFADSVMVASSAGGVHDGGAMLSAASANGSAGAGAASANGSGSIGLSMIKNWLRSQPAPMQPRVAAAESVQGLSLSMNMAGATQGAAGMPLLAGERGRAPESVSTSAQGGAVVTAPKEDSGGSGVAATGALVAVSTDTGGSGASADNTARKTVDTFGQRTSIYRGVTRHRWTGRYEAHLWDNSCRREGQTRKGRQVYLGGYDKEEKAARAYDLAALKYWGPTTTTNFPVNNYEKELEDMKHMTRQEFVASLRRKSSGFSRGASIYRGVTRHHQHGRWQARIGRVAGNKDLYLGTFSTQEEAAEAYDIAAIKFRGLNAVTNFDMSRYDVKSILDSSALPIGSAAKRLKEAEAAASAQHHAGVVSYDVGRIASQLGDGGALAAAYGAHYHGAWPTIAFQPSAATGLYHPYAQPMRGWCKQEQDHAVIAAAHSLQELHHLNLGAAAGAHDFFSAGQQAAMHGLGSMDNASLEHSTGSNSVVYNGVGDSNGSTVVGSGGYMMPMSAATATATTAMVSHEQVHARAQGDHHDEAKQAAQMGYESYLVNAENYGGGRMSAAWATVSAPPAASSNDNMADVGHGGAQLFSVWNDT

SEQ ID NO: 27 - protein, 8 aa, Sorghum bicolor
PKLEDFLG

SEQ ID NO: 28 - protein, 13 aa, Sorghum bicolor
IGLSMIKNWLRSQ

SEQ ID NO: 29 - protein, 397 aa, Sorghum bicolor
VDTFGQRTSIYRGVTRHRWTGRYEAHLWDNSCRREGQTRKGRQVYLGGYDKEEKAARAYDLAALKYWGPTTTTNFPVNNYEKELEDMKHMTRQEFVASLRRKSSGFSRGASIYRGVTRHHQHGRWQARIGRVAGNKDLYLGTFSTQEEAAEAYDIAAIKFRGLNAVTNFDMSRYDVKSILDSSALPIGSAAKRLKEAEAAASAQHHAGVVSYDVGRIASQLGDGGALAAAYGAHYHGAWPTIAFQPSAATGLYHPYAQPMRGWCKQEQDHAVIAAAHSLQELHHLNLGAAAGAHDFFSAGQQAAMHGLGSMDNASLEHSTGSNSVVYNGVGDSNGSTVVGSGGYMMPMSAATATATTAMVSHEQVHARAQGDHHDEAKQAAQMGYESYLVNAENYGG

SEQ ID NO: 30 - protein, 693 aa, Sorghum bicolor
MASTNNHWLGFSLSGQDNPQPNHQDSSPAAAGIDISGASDFYGLPTQQGSDGNLGVPGLRDDHASYGIMEAFNRVPQETQDWNMRGLDYNGGGSELSMLVGSSGGGGGGGKRAVEDSEPKLEDFLGGNSFVSEHDQSGGYLFSGVPMASSTNSNSGSNTMELSMIKTWLRNNQVPQPQPPAAPHQAPQTEEMSTDANASASSFGCSDSMGRNGTVAAAGSSQSLALSMSTGSHLPMVVAGGGASGAASESTSSENKRASGAMDSPGSAVEAVPRKSIDTFGQRTSIYRGVTRHRWTGRYEAHLWDNSCRREGQSRKGRQVYLGGYDKEDKAARAYDLAALKYWGTTTTTNFPISNYEKELEEMKHMTRQEYIAYLRRNSSGFSRGASKYRGVTRHHQHGRWQARIGRVAGNKDLYLGTFSTEEEAAEAYDIAAIKFRGLNAVTNFDMSRYDVKSILESSTLPVGGAARRLKDAVDHVEAGATIWRADMDGGVISQLAEAGMGGYASYGHHAWPTIAFQQPSPLSVHYPYGQPPSRGWCKPEQDAAVAAAAHSLQDLQQLHLGSAAHNFFQASSSSAVYNSGGGGASGGYHQGLGGGSSSFLMPSSTVVAGADQGHSSSTANQGSTCSYGDDHQEGKLIGYDAMVAATAAGGDPYAAARSGYQFSSQGSGSTVSIARANGYSNNWSSPFNGGMG

SEQ ID NO: 31 - protein, 8 aa, Sorghum bicolor
PKLEDFLG

SEQ ID NO: 32 - protein, 17 aa, Sorghum bicolor
MELSMIKTWLRNNQVPQ

SEQ ID NO: 33 - protein, 380 aa, Sorghum bicolor
IDTFGQRTSIYRGVTRHRWTGRYEAHLWDNSCRREGQSRKGRQVYLGGYDKEDKAARAYDLAALKYWGTTTTTNFPISNYEKELEEMKHMTRQEYIAYLRRNSSGFSRGASKYRGVTRHHQHGRWQARIGRVAGNKDLYLGTFSTEEEAAEAYDIAAIKFRGLNAVTNFDMSRYDVKSILESSTLPVGGAARRLKDAVDHVEAGATIWRADMDGGVISQLAEAGMGGYASYGHHAWPTIAFQQPSPLSVHYPYGQPPSRGWCKPEQDAAVAAAAHSLQDLQQLHLGSAAHNFFQASSSSAVYNSGGGGASGGYHQGLGGGSSSFLMPSSTVVAGADQGHSSSTANQGSTCSYGDDHQEGKLIGYDAMVAATAAGGDPYAA

SEQ ID NO: 34 - protein, 702 aa, Miscanthus sinensis
MATVNNWLAFSLSPQELPPSQTDSTLISAATTDDVSGDVCFNIPQDWSMRGSELSALVAEPKLEDFLGGISFSEQHHKANCNMIPSTSSTACYASSGATTDYHHQLYHQPTSSALHFADSVMVASSAGVHDGGAMLSVATANGGAGAASANGGGSIGLSMIKNWLRNQPAPMQPRVAAAESAQGLSLSMNMAGATQGAAVMPLLAGERGRAPESVSTSSAQGGAVVTAPKEDSSGSGVAGAGALVAVSTDTGGSGASADNTARKTVDTFGQRTSIYRGVTRHRWTGRYEAHLWDNSCRREGQTRKGRQVYLGGYDKEEKAARAYDLAALKYWGPTTTTNFPVSNYEMELEDMKHMTRQEFVASLRRKSSGFSRGASIYRGVTRHHQHGRWQARIGRVAGNKDLYLGTFSTQEEAAEAYDIAAIKFRGLNAVTNFDMSRYDVKSILDSSALPIGSAAKRLKEAEAAASAQHHAGVVSYDVGRIASQLGDGGALAAAYSAHYHGAWPTIAFQPSAATGLYHPYAQPMRGWCKQEQDHAVIAAAHSLQELHHLNLGAAGAHDFFSTGQQAAMHGLGSMDNASLEHSTGSNSVVYNGVGDSNGSSIVGGGGYMMPMSAAAATATTAMVSQEQVHARALGDHDEAKQAAQMGYESYLVNAENYGGGRMSAAWATVSAPPVAAAASSNDNMADVGHGGAQLFSVWNDT

SEQ ID NO: 35 - protein, 8 aa, Miscanthus sinensis
PKLEDFLG

SEQ ID NO: 36 - protein, 13 aa, Miscanthus sinensis
IGLSMIKNWLRNQ

SEQ ID NO: 37 - protein, 395 aa, Miscanthus sinensis
VDTFGQRTSIYRGVTRHRWTGRYEAHLWDNSCRREGQTRKGRQVYLGGYDKEEKAARAYDLAALKYWGPTTTTNFPVSNYEMELEDMKHMTRQEFVASLRRKSSGFSRGASIYRGVTRHHQHGRWQARIGRVAGNKDLYLGTFSTQEEAAEAYDIAAIKFRGLNAVTNFDMSRYDVKSILDSSALPIGSAAKRLKEAEAAASAQHHAGVVSYDVGRIASQLGDGGALAAAYSAHYHGAWPTIAFQPSAATGLYHPYAQPMRGWCKQEQDHAVIAAAHSLQELHHLNLGAAGAHDFFSTGQQAAMHGLGSMDNASLEHSTGSNSVVYNGVGDSNGSSIVGGGGYMMPMSAAAATATTAMVSQEQVHARALGDHDEAKQAAQMGYESYLVNAENYGG

SEQ ID NO: 38 - protein, 524 aa, Miscanthus sinensis
MELSMIKTWLRNNQVPQPQPPAAPHQAPQPEEMSTDASASSFGCSDSMGRNGTVAAAGSSQSLALSMSTGSHLPMVVAGGGASGAASESTSSENKRASGAMDSPGSAVEAVPRKSIDTFGQRTSIYRGVTRHRWTGRYEAHLWDNSCRREGQSRKGRQVYLGGYDKEDKAARAYDLAALKYWGTTTTTNFPISNYEKELEEMKHMTRQEYIAYLRRNSSGFSRGASKYRGVTRHHQHGRWQARIGRVAGNKDLYLGTFSTEEEAAEAYDIAAIKFRGLNAVTNFDMSRYDVKSILESSTLPVGGAARRLKDAVDHVEAGATIWRADMDGGVISQLAEAGMGGYASYGHHGWPTIAFQQPSPLSVHYPYGQPPSRGWCKPEQDAAVAAAAHSLQDLQQLHLGSAAHNFFQASSSSAVYNSGGGYHQGLGGGGSSFLMPSSTVVAAADQGHSSTANQGSTCSYGDDHQEGKLIGYDAMVAATAAGGDPYAAARSGYQFSQGSGSTVSIARANGYSNNWSSPFNGMG

SEQ ID NO: 39 - protein, 8 aa, Miscanthus sinensis
PKLEDFLG

SEQ ID NO: 40 - protein, 14 aa, Miscanthus sinensis
MELSMIKTWLRNNQ

SEQ ID NO: 41 - protein, 374 aa, Miscanthus sinensis
IDTFGQRTSIYRGVTRHRWTGRYEAHLWDNSCRREGQSRKGRQVYLGGYDKEDKAARAYDLAALKYWGTTTTTNFPISNYEKELEEMKHMTRQEYIAYLRRNSSGFSRGASKYRGVTRHHQHGRWQARIGRVAGNKDLYLGTFSTEEEAAEAYDIAAIKFRGLNAVTNFDMSRYDVKSILESSTLPVGGAARRLKDAVDHVEAGATIWRADMDGGVISQLAEAGMGGYASYGHHGWPTIAFQQPSPLSVHYPYGQPPSRGWCKPEQDAAVAAAAHSLQDLQQLHLGSAAHNFFQASSSSAVYNSGGGYHQGLGGGGSSFLMPSSTVVAAADQGHSSTANQGSTCSYGDDHQEGKLIGYDAMVAATAAGGDPYAA

SEQ ID NO: 42 - protein, 695 aa, Oryza sativa
MATMNNWLAFSLSPQDQLPPSQTNSTLISAAATTTTAGDSSTGDVCFNIPQDWSMRGSELSALVAEPKLEDFLGGISFSEQQHHHGGKGGVIPSSAAACYASSGSSVGYLYPPPSSSSLQFADSVMVATSSPVVAHDGVSGGGMVSAAAAAAASGNGGIGLSMIKNWLRSQPAPQPAQALSLSMNMAGTTTAQGGGAMALLAGAGERGRTTPASESLSTSAHGATTATMAGGRKEINEEGSGSAGAVVAVGSESGGSGAVVEAGAAAAAARKSVDTFGQRTSIYRGVTRHRWTGRYEAHLWDNSCRREGQTRKGRQVYLGGYDKEEKAARAYDLAALKYWGPTTTTNFPVNNYEKELEEMKHMTRQEFVASLRRKSSGFSRGASIYRGVTRHHQHGRWQARIGRVAGNKDLYLGTFSTQEEAAEAYDIAAIKFRGLNAVTNFDMSRYDVKSILDSAALPVGTAAKRLKDAEAAAAYDVGRIASHLGGDGAYAAHYGHHHHSAAAAWPTIAFQAAAAPPPHAAGLYHPYAQPLRGWCKQEQDHAVIAAAHSLQDLHHLNLGAAAAAHDFFSQAMQQQHGLGSIDNASLEHSTGSNSVVYNGDNGGGGGGYIMAPMSAVSATATAVASSHDHGGDGGKQVQMGYDSYLVGADAYGGGGAGRMPSWAMTPASAPAATSSSDMTGVCHGAQLFSVWNDT

SEQ ID NO: 43 - protein, 8 aa, Oryza sativa
PKLEDFLG

SEQ ID NO: 44 - protein, 13 aa, Oryza sativa
IGLSMIKNWLRSQ

SEQ ID NO: 45 - protein, 382 aa, Oryza sativa
SVDTFGQRTSIYRGVTRHRWTGRYEAHLWDNSCRREGQTRKGRQVYLGGYDKEEKAARAYDLAALKYWGPTTTTNFPVNNYEKELEEMKHMTRQEFVASLRRKSSGFSRGASIYRGVTRHHQHGRWQARIGRVAGNKDLYLGTFSTQEEAAEAYDIAAIKFRGLNAVTNFDMSRYDVKSILDSAALPVGTAAKRLKDAEAAAAYDVGRIASHLGGDGAYAAHYGHHHHSAAAAWPTIAFQAAAAPPPHAAGLYHPYAQPLRGWCKQEQDHAVIAAAHSLQDLHHLNLGAAAAAHDFFSQAMQQQHGLGSIDNASLEHSTGSNSVVYNGDNGGGGGGYIMAPMSAVSATATAVASSHDHGGDGGKQVQMGYDSYLVGADAYGG

SEQ ID NO: 46 - protein, 703 aa, Oryza sativa
MASANNWLGFSLSGQENPQPHQDSSPPAAIDVSGAGDFYGLPTSQPTAADAHLGVAGHHHNASYGIMEAFNRGAQEAQDWNMRGLDYNGGASELSMLVGSSGGKRAAAVEETEPKLEDFLGGNSFVSEQDHHAAGGFLFSGVPMASSTNSNSGSNTMELSMIKTWLRNNGQVPAGHQPQQQQPAAAAAAAQQQAHEAAEMSTDASASSFGCSSDAMGRSNNGGAVSAAAGGTSSQSLALSMSTGSHSHLPIVVAGGGNASGGAAESTSSENKRASGAMDSPGGGAIEAVPRKSIDTFGQRTSIYRGVTRHRWTGRYEAHLWDNSCRREGQSRKGRQVYLGGYDKEDKAARAYDLAALKYWGTTTTTNFPISNYEKELDEMKHMTRQEYIAYLRRNSSGFSRGASKYRGVTRHHQHGRWQARIGRVAGNKDLYLGTFSTEEEAAEAYDIAAIKFRGLNAVTNFDMSRYDVKSILESSTLPVGGAARRLKEAADHAEAAGATIWRAADMDGAGVISGLADVGMGAYAASYHHHHHHGWPTIAFQQPPPLAVHYPYGQAPAAPSRGWCKPEQDAAVAAAAHSLQDLQQLHLGSAAAHNFFQASSSSTVYNGGGGGYQGLGGNAFLMPASTVVADQGHSSTATNHGNTCSYGNEEQGKLIGYDAMAMASGAAGGGYQLSQGSASTVSIARANGYSANWSSPFNGAMG

SEQ ID NO: 47 - protein, 8 aa, Oryza sativa
PKLEDFLG

SEQ ID NO: 48 - protein, 15 aa, Oryza sativa
MELSMIKTWLRNNGQ

SEQ ID NO: 49 - protein, 378 aa, Oryza sativa
IDTFGQRTSIYRGVTRHRWTGRYEAHLWDNSCRREGQSRKGRQVYLGGYDKEDKAARAYDLAALKYWGTTTTTNFPISNYEKELDEMKHMTRQEYIAYLRRNSSGFSRGASKYRGVTRHHQHGRWQARIGRVAGNKDLYLGTFSTEEEAAEAYDIAAIKFRGLNAVTNFDMSRYDVKSILESSTLPVGGAARRLKEAADHAEAAGATIWRAADMDGAGVISGLADVGMGAYAASYHHHHHHGWPTIAFQQPPPLAVHYPYGQAPAAPSRGWCKPEQDAAVAAAAHSLQDLQQLHLGSAAAHNFFQASSSSTVYNGGGGGYQGLGGNAFLMPASTVVADQGHSSTATNHGNTCSYGNEEQGKLIGYDAMAMASGAAGGG

SEQ ID NO: 50 - protein, 559 aa, Oryza sativa
MASITNWLGFSSSSFSGAGADPVLPHPPLQEWGSAYEGGGTVAAAGGEETAAPKLEDFLGMQVQQETAAAAAGHGRGGSSSVVGLSMIKNWLRSQPPPAVVGGEDAMMALAVSTSASPPVDATVPACISPDGMGSKAADGGGAAEAAAAAAAQRMKAAMDTFGQRTSIYRGVTKHRWTGRYEAHLWDNSCRREGQTRKGRQVNAGGYDKEEKAARAYDLAALKYWGTTTTTNFPVSNYEKELDEMKHMNRQEFVASLRRKSSGFSRGASIYRGVTRHHQHGRWQARIGRVAGNKDLYLGTFGTQEEAAEAYDIAAIKFRGLNAVTNFDMSRYDVKSIIESSNLPIGTGTTRRLKDSSDHTDNVMDINVNTEPNNVVSSHFTNGVGNYGSQHYGYNGWSPISMQPIPSQYANGQPRAWLKQEQDSSVVTAAQNLHNLHHFSSLGYTHNFFQQSDVPDVTGFVDAPSRSSDSYSFRYNGTNGFHGLPGGISYAMPVATAVDQGQGIHGYGEDGVAGIDTTHDLYGSRNVYYLSEGSLLADVEKEGDYGQSVGGNSWVLPTP

SEQ ID NO: 51 - protein, 8 aa, Oryza sativa
PKLEDFLG

SEQ ID NO: 52 - protein, 13 aa, Oryza sativa
VGLSMIKNWLRSQ

SEQ ID NO: 53 - protein, 366 aa, Oryza sativa
MDTFGQRTSIYRGVTKHRWTGRYEAHLWDNSCRREGQTRKGRQVNAGGYDKEEKAARAYDLAALKYWGTTTTTNFPVSNYEKELDEMKHMNRQEFVASLRRKSSGFSRGASIYRGVTRHHQHGRWQARIGRVAGNKDLYLGTFGTQEEAAEAYDIAAIKFRGLNAVTNFDMSRYDVKSIIESSNLPIGTGTTRRLKDSSDHTDNVMDINVNTEPNNVVSSHFTNGVGNYGSQHYGYNGWSPISMQPIPSQYANGQPRAWLKQEQDSSVVTAAQNLHNLHHFSSLGYTHNFFQQSDVPDVTGFVDAPSRSSDSYSFRYNGTNGFHGLPGGISYAMPVATAVDQGQGIHGYGEDGVAGIDTTHDLYGS

SEQ ID NO: 54 - protein, 687 aa, Brachypodium distachyon
MATVNNWLGFSLSPQELPSSAAAAAGDVSGADVCFNIPQDWGMRGSELSALVAEPKLEDFLGGISSYSDHHKAARSNNMNINGAAACYASSGSSGYQLYHDHPNSLQFADSVMVASSAGGVHNEHGIMASTTANGAGTNGGIGLSMIKSWLRSQPAPAQQEQQRAEGLSLSMNMPLLQAAAAETSLSTSAAQQGSRKENNGSSSAGSGAVVSAGTTSAGAVVVESPAAGRKTADTFGQRTSIYRGVTRHRWTGRYEAHLWDNSCRREGQTRKGRVYLQGGYDKEEKAARAYDLAALKYWGPTTTTNFPVDNYEKELEEMKHMTRQEFVASLRRKSSGFSRGASIYRGVTRHHQHGRWQARIGRVAGNKDLYLGTFSTQEEAAEAYDIAAIKFRGLNAVTNFDMSRYDVKSILDSTAALPVGGTKRLRDAAAADQHYQQRAGGVVSYAAPQLGGVNETALAYGAPYYHHQTSAAAWPTIAFQAAPQASSGHGHMLYHPYGQPLMRGWCKQEQEQGQGQQEPDHAVIAAAHSLQDLHHLNLGAGAHDFFSQHAHAMHQQQQQHGGLGSVDNNGAASLEHSTGSNSVVYNGAAAAGDTNNSYMLPPMSAAAAAGFGLRDQQDEGGKMAYENFLLGAATDGYCGPGRMAATWTPVSVSAAQPVAATSSGSDMAGAVCHGGAQLFSVWNDDS

SEQ ID NO: 55 - protein, 8 aa, Brachypodium distachyon
PKLEDFLG

SEQ ID NO: 56 - protein, 13 aa, Brachypodium distachyon
IGLSMIKSWLRSQ

SEQ ID NO: 57 - protein, 443 aa, Brachypodium distachyon
ADTFGQRTSIYRGVTRHRWTGRYEAHLWDNSCRREGQTRKGRVYLQGGYDKEEKAARAYDLAALKYWGPTTTTNFPVDNYEKELEEMKHMTRQEFVASLRRKSSGFSRGASIYRGVTRHHQHGRWQARIGRVAGNKDLYLGTFSTQEEAAEAYDIAAIKFRGLNAVTNFDMSRYDVKSILDSTAALPVGGTKRLRDAAAADQHYQQRAGGVVSYAAPQLGGVNETALAYGAPYYHHQTSAAAWPTIAFQAAPQASSGHGHMLYHPYGQPLMRGWCKQEQEQGQGQQEPDHAVIAAAHSLQDLHHLNLGAGAHDFFSQHAHAMHQQQQQHGGLGSVDNNGAASLEHSTGSNSVVYNGAAAAGDTNNSYMLPPMSAAAAAGFGLRDQQDEGGKMAYENFLLGAATDGYCGPGRMAATWTPVSVSAAQPVAATSSGSDMAGAVCHG

SEQ ID NO: 58 - protein, 692 aa, Brachypodium distachyon
MASGNNWLEFSLSGQENPQPHRDSSPVAAIDISGSGDFYGLPTQPVPDTQLGMPGHHASYGVMEAFNRGTHETHDWSNMRGLDYNGGGSELSMLVGSSAVGGKIRGAVEEITEPKLEDFLGGNSFVDSEQDQAGAGGFLFSGVPMAPMAGSNSGSNTMELSMIKTWLRNNQNHVSQPHPQQHQPQPHEEMSMSTDASASSFGDALGRNGVVPAAGSSQSQSLALSMSTGSGSSHLPMVVAGGSAAVVGAADQPESSSSENKRASGAMDSPGGAVEAVARKSIDTFGQRTSIYRGVTRHRWTGRYEAHLWDNSCRREGQSRKGRQVYLGGYDKEDKAARAYDLAALKYWGTTTTTNFPINTYEKEVDEMKHMTRQEYIAYLRRNSSGFSRGASKYRGVTRHHQHGRWQARIGRVAGNKDLYLGTFSTEEEAAEAYDIAAIKFRGLNAVTNFDMNRYDVKSILESSTLPVGGAARRLKDAPEATIWRAGDMDAGGSSISHQLTNNVGMGGMGPYAGSYHQGHGWPSTIVFQHQPSPLSVHYPYALHQPPRGWCKPEQDVVAAASHSLQELQQLHLGTAHNFFQQASAGSTVYNGGINGAGFLMPAPASTVVAEQGHSSTATNQGSICSYGDDEEGKLIGIGYDAMTMASTGDPYAAARAAGGYGQLPQGSASTVSIARANGCSNNWTSPFNGMG

SEQ ID NO: 59 - protein, 8 aa, Brachypodium distachyon
PKLEDFLG

SEQ ID NO: 60 - protein, 14 aa, Brachypodium distachyon
MELSMIKTWLRNNQ

SEQ ID NO: 61 - protein, 373 aa, Brachypodium distachyon
IDTFGQRTSIYRGVTRHRWTGRYEAHLWDNSCRREGQSRKGRQVYLGGYDKEDKAARAYDLAALKYWGTTTTTNFPINTYEKEVDEMKHMTRQEYIAYLRRNSSGFSRGASKYRGVTRHHQHGRWQARIGRVAGNKDLYLGTFSTEEEAAEAYDIAAIKFRGLNAVTNFDMNRYDVKSILESSTLPVGGAARRLKDAPEATIWRAGDMDAGGSSISHQLTNNVGMGGMGPYAGSYHQGHGWPSTIVFQHQPSPLSVHYPYALHQPPRGWCKPEQDVVAAASHSLQELQQLHLGTAHNFFQQASAGSTVYNGGINGAGFLMPAPASTVVAEQGHSSTATNQGSICSYGDDEEGKLIGIGYDAMTMASTGDPYAA

SEQ ID NO: 62 - protein, 572 aa, Musa acuminata
MNNWLGFSPSPQELPPSQAHQTHPSPGIISGGDVSTDPSSVTPLGVPSQRPDGSFGILETLDAPDHHLQGWSMKSIGYKGSDHELSVLVGSSSNQNTMDEEEQPKLEDYLGGHSFARYDRKLPPIAGNYADSGGYMLSNGCNNGGLMSSTDGCNSSSIGLSMIKAWLRNQPAPPAPVEGNGSDAAGCTNMIAQSLSLSMKTVPRKSMDSFGQRTSIYRGVTRHRWTGRYEAHLWDNSCRREGQSRKGKQVYLGGYDKEDKAARAYDLAALKYWGASTTTNFPISNYEKEVEEMKHMTRQEYVASLRRKSSGFSRGASMYRGVTRHHQHGRWQARIGRVAGNKDLYLGTFSTQEEAAEAYDIAAIKFRGVNAVTNFDMSRYDVKAILKSSALPVGGAAKRLDEISDDTEASVDGSMASHFTETLGGWPTIAFRQGHPLSCHYPYGQPSGWCKQEQGAMTAAAARRVQDLQQFNLGSNTQTFFQPSMHQRMMVPDAVIYTGNAGGNYQMDGITGRNMMPVSTMVGNQGQTEGKQMAQVNVLAAGDPYGGRNVYYLSQEDSGHEQTNGSNNWMAS

SEQ ID NO: 63 - protein, 8 aa, Musa acuminata
PKLEDYLG

SEQ ID NO: 64 - protein, 13 aa, Musa acuminata
IGLSMIKAWLRNQ

SEQ ID NO: 65 - protein, 341 aa, Musa acuminata
MDSFGQRTSIYRGVTRHRWTGRYEAHLWDNSCRREGQSRKGKQVYLGGYDKEDKAARAYDLAALKYWGASTTTNFPISNYEKEVEEMKHMTRQEYVASLRRKSSGFSRGASMYRGVTRHHQHGRWQARIGRVAGNKDLYLGTFSTQEEAAEAYDIAAIKFRGVNAVTNFDMSRYDVKAILKSSALPVGGAAKRLDEISDDTEASVDGSMASHFTETLGGWPTIAFRQGHPLSCHYPYGQPSGWCKQEQGAMTAAAARRVQDLQQFNLGSNTQTFFQPSMHQRMMVPDAVIYTGNAGGNYQMDGITGRNMMPVSTMVGNQGQTEGKQMAQVNVLAAGDPYGG

SEQ ID NO: 66 - protein, 624 aa, Musa acuminata
MNNWLGFSLSPQELPPSQSHQTHPSSGIISNDEVSADCYGLSTDSSSTAPLGIPTLRPDGSFGILEAIHRPGYHSQGSSSELSMLVGASSNQNTMDNEQPKLEDFLGGHSFARHDQKLPSIAGNYDNPGGYMFSHGCNNGGLMSSNAGCSSSSIGLSMIKTWLRNQPAPPSQVEGNGTSGDGCSTMNGGGAVVGNVGGALTSSQSLSLEGSGVSAALDAQSGALETVPRKSIDTFGQRTSIYRGVTRHRWTGRYEAHLWDNSCRREGQTRKGRQAGGYDKEEKAARAYDLAALKYWGTSTTTNFPISNYEKELEEMKHMTRQEYVASLRRKSSGFSRGASIYRGVTRHHQHGRWQARIGRVAGNKDLYLGTFSTQEEAAEAYDIAAIKFRGLNAVTNFDMSRYDVKAILESSTLPIGGAAKRLKEISEHTEASVDGRMADVGSITSHLTDTISSYASHHHGWPTMGFQQSQPLAVHYPYGHQPRGWYCKQEQDAVIAAAHGLQDLQQLNLGNSTHNFFQPSVIHNLVNLESSSMDHGTGGGFVMPVGTTMVGDQNNPGSSSSYAESEGKQMGYENILSTGDPYAGRSIYYLSQQSGGGSGASANGGNNVTVCHGAPLFTVWNDA

SEQ ID NO: 67 - protein, 8 aa, Musa acuminata
PKLEDFLG

SEQ ID NO: 68 - protein, 13 aa, Musa acuminata
IGLSMIKTWLRNQ

SEQ ID NO: 69 - protein, 354 aa, Musa acuminata
IDTFGQRTSIYRGVTRHRWTGRYEAHLWDNSCRREGQTRKGRQAGGYDKEEKAARAYDLAALKYWGTSTTTNFPISNYEKELEEMKHMTRQEYVASLRRKSSGFSRGASIYRGVTRHHQHGRWQARIGRVAGNKDLYLGTFSTQEEAAEAYDIAAIKFRGLNAVTNFDMSRYDVKAILESSTLPIGGAAKRLKEISEHTEASVDGRMADVGSITSHLTDTISSYASHHHGWPTMGFQQSQPLAVHYPYGHQPRGWYCKQEQDAVIAAAHGLQDLQQLNLGNSTHNFFQPSVIHNLVNLESSSMDHGTGGGFVMPVGTTMVGDQNNPGSSSSYAESEGKQMGYENILSTGDPYAG

SEQ ID NO: 70 - protein, 698 aa, Setaria viridis
MATVNNWLAFSLSPQDLPPSQTDSTLISATATDEVSGDVCFNIPQDWSMRGSELSALVAEPKLEDFLGGINFSEQHHKANLNVIPSSSNACYASSGASTGYHQLYHHQSSALHFADSVMVASSAGVHDGGASMLSAAATVNGGAGAASANGGSIGLSMIKNWLRSQPAPPLPQPRVVAAAEGAQAAQGLSLSMNMAGAQGAGMPLLAGERGRAPESVSTSAQGGAVAARKEDSGGSGGAGALVAVSTDTGGSGTVAETAARKTVDTFGQRTSIYRGVTRHRWTGRYEAHLWDNSCRREGQTRKGRQVYLGGYDKEEKAARAYDLAALKYWGPTTTTNFPVSNYEKELEEMKHMTRQEFVASLRRKSSGFSRGASIYRGVTRHHQHGRWQARIGRVAGNKDLYLGTFSTQEEAAEAYDIAAIKFRGLNAVTNFDMSRYDVKSILDSSALPIGSAAKRLKEAEAAASAQHAGVVSYDVGRIASHLGDGGALAAYGTHYHAAAAAWPTIAFQPSAAAAGLYHPYAQPMRGWCKQEQDHAVIAAAHSLHELNHLNLGAAAGAHDFFSAGQAAMHGLGSIDNASLEHSTGSNSVVYNGVGDSNGGAVGGGYMMPMSAAAATTTAMVSHEQVHARSHQGEHDEATKQAAQMGYESYLVNAEAAYGGGRMPSWTPASAPAAASSNDNMAGVGHGGAQLFSVWNDT

SEQ ID NO: 71 - protein, 8 aa, Setaria viridis
PKLEDFLG

SEQ ID NO: 72 - protein, 13 aa, Setaria viridis
IGLSMIKNWLRSQ

SEQ ID NO: 73 - protein, 397 aa, Setaria viridis
VDTFGQRTSIYRGVTRHRWTGRYEAHLWDNSCRREGQTRKGRQVYLGGYDKEEKAARAYDLAALKYWGPTTTTNFPVSNYEKELEEMKHMTRQEFVASLRRKSSGFSRGASIYRGVTRHHQHGRWQARIGRVAGNKDLYLGTFSTQEEAAEAYDIAAIKFRGLNAVTNFDMSRYDVKSILDSSALPIGSAAKRLKEAEAAASAQHAGVVSYDVGRIASHLGDGGALAAYGTHYHAAAAAWPTIAFQPSAAAAGLYHPYAQPMRGWCKQEQDHAVIAAAHSLHELNHLNLGAAAGAHDFFSAGQAAMHGLGSIDNASLEHSTGSNSVVYNGVGDSNGGAVGGGYMMPMSAAAATTTAMVSHEQVHARSHQGEHDEATKQAAQMGYESYLVNAEAAYGG

SEQ ID NO: 74 - protein, 677 aa, Setaria viridis
MASANNWLGFSLSGQDNPQANQDSSPAAAGIDISGATDFYGLPTQQGSDGHLGVPGLRDDHASYGIMEAFNRSQQETQDWNMRGLDYNGGASELSMLVGSSGGKRAVEDGEPKLEDFLGGNSFVSEQDQSGGYLFSGVPMASSTNSNSGSNTMELSMIKTWLRNNQVPQPQPPAPHQAAPQPEEMSTDASASSFGCSDSLGRNGTVAAGSSQSLALSMSTGPQHLPMVVAGGGGGASGAAASESTSSENKRASGAMDSPSSGAIEAVPRKSIDTFGQRTSIYRGVTRHRWTGRYEAHLWDNSCRREGQSRKGRQVYLGGYDKEDKAARAYDLAALKYWGTTTTTNFPISNYEKELEEMKHMTRQEYIAYLRRNSSGFSRGASKYRGVTRHHQHGRWQARIGRVAGNKDLYLGTFSTEEEAAEAYDIAAIKFRGLNAVTNFDMSRYDVKSILESSTLPVGGAARRLKDAVDHVEAGATIWRADMDAGVISQLADAGMGAYASYGHHGWPTIAFQQPSPLTVHYPYGQPSRGWCKPEQDAAVAAAAHSLQDLQQLHLGSAAHNFFQASSSSTVYNGGGASAAGYQGLGSGGGGSFLMPSSTVVADQGHSSTANQGSTCSYGDDQDGKLIGYDAMAAAGGDPYAAARSGYQFSQGSGSTVSIARANGYSNNWSSPFNGMG

SEQ ID NO: 75 - protein, 8 aa, Setaria viridis
PKLEDFLG

SEQ ID NO: 76 - protein, 14 aa, Setaria viridis
MELSMIKTWLRNNQ

SEQ ID NO: 77 - protein, 371 aa, Setaria viridis
IDTFGQRTSIYRGVTRHRWTGRYEAHLWDNSCRREGQSRKGRQVYLGGYDKEDKAARAYDLAALKYWGTTTTTNFPISNYEKELEEMKHMTRQEYIAYLRRNSSGFSRGASKYRGVTRHHQHGRWQARIGRVAGNKDLYLGTFSTEEEAAEAYDIAAIKFRGLNAVTNFDMSRYDVKSILESSTLPVGGAARRLKDAVDHVEAGATIWRADMDAGVISQLADAGMGAYASYGHHGWPTIAFQQPSPLTVHYPYGQPSRGWCKPEQDAAVAAAAHSLQDLQQLHLGSAAHNFFQASSSSTVYNGGGASAAGYQGLGSGGGGSFLMPSSTVVADQGHSSTANQGSTCSYGDDQDGKLIGYDAMAAAGGDPYAA

SEQ ID NO: 78 - protein, 698 aa, Setaria italica
MATVNNWLAFSLSPQDLPPSQTDSTLISATATDEVSGDVCFNIPQDWSMRGSELSALVAEPKLEDFLGGINFSEQHHKANLNVIPSSSNACYASSGASTGYHQLYHHQSSALHFADSVMVASSAGVHDGGASMLSAAATVNGGAGAASANGGSIGLSMIKNWLRSQPAPPLPQPRVVAAAEGAQAAQGLSLSMNMAGAQGAGMPLLAGERGRAPESVSTSAQGGAVAARKEDSGSSGGAGALLAVSTDTGGSGTVAETAARKTVDTFGQRTSIYRGVTRHRWTGRYEAHLWDNSCRREGQTRKGRQVYLGGYDKEEKAARAYDLAALKYWGPTTTTNFPVSNYEKELEEMKHMTRQEFVASLRRKSSGFSRGASIYRGVTRHHQHGRWQARIGRVAGNKDLYLGTFSTQEEAAEAYDIAAIKFRGLNAVTNFDMSRYDVKSILDSSALPIGSAAKRLKEAEAAASAQHAGVVSYDVGRIASHLGDGGALAAYGTHYHAAAAAWPTIAFQPSAAAAGLYHPYAQPMRGWCKQEQDHAVIAAAHSLHELNHLNLGAGGGAHDFFSAGQAAMHGLGSIDNASLEHSTGSNSVVYNGVGDSNGGAVGGGYMMPMSAATATTTAMVSHEQVHARSHQGEHDEATKQAAQMGYESYLVNAEAAYGGGRMPSWTPASAPAAASSNDNMAGVGHGGAQLFSVWNDT

SEQ ID NO: 79 - protein, 8 aa, Setaria italica
PKLEDFLG

SEQ ID NO: 80 - protein, 13 aa, Setaria italica
IGLSMIKNWLRSQ

SEQ ID NO: 81 - protein, 397 aa, Setaria italica
VDTFGQRTSIYRGVTRHRWTGRYEAHLWDNSCRREGQTRKGRQVYLGGYDKEEKAARAYDLAALKYWGPTTTTNFPVSNYEKELEEMKHMTRQEFVASLRRKSSGFSRGASIYRGVTRHHQHGRWQARIGRVAGNKDLYLGTFSTQEEAAEAYDIAAIKFRGLNAVTNFDMSRYDVKSILDSSALPIGSAAKRLKEAEAAASAQHAGVVSYDVGRIASHLGDGGALAAYGTHYHAAAAAWPTIAFQPSAAAAGLYHPYAQPMRGWCKQEQDHAVIAAAHSLHELNHLNLGAGGGAHDFFSAGQAAMHGLGSIDNASLEHSTGSNSVVYNGVGDSNGGAVGGGYMMPMSAATATTTAMVSHEQVHARSHQGEHDEATKQAAQMGYESYLVNAEAAYGG

SEQ ID NO: 82 - protein, 677 aa, Setaria italica
MASANNWLGFSLSGQDNPQANQDSSPAAAGIDISGATDFYGLPTQQGSDGHLGVPGLRDDHASYGIMEAFNRSQQETQDWNMRGLDYNGGASELSMLVGSSGGKRAVEDGEPKLEDFLGGNSFVSEQDQSGGYLFSGVPMASSTNSNSGSNTMELSMIKTWLRNNQVPQPQPPAPHQAAPQPEEMSTDASASSFGCSDSLGRNGTVAAGSSQSLALSMSTGPQHLPMVVAGGGGGASGAAASESTSSENKRASGAMDSPSSGAIEAVPRKSIDTFGQRTSIYRGVTRHRWTGRYEAHLWDNSCRREGQSRKGRQVYLGGYDKEDKAARAYDLAALKYWGTTTTTNFPISNYEKELEEMKHMTRQEYIAYLRRNSSGFSRGASKYRGVTRHHQHGRWQARIGRVAGNKDLYLGTFSTEEEAAEAYDIAAIKFRGLNAVTNFDMSRYDVKSILESSTLPVGGAARRLKDAVDHVEAGATIWRADMDAGVISQLADAGMGAYASYGHHGWPTIAFQQPSPLTVHYPYGQPSRGWCKPEQDAAVAAAAHSLQDLQQLHLGSAAHNFFQASSSSTVYNGGGASAAGYQGLGGGGGGSFLMPSSTVVADQGHSSTANQGSTCSYGDDQDGKLIGYDAMAAAGGDPYAAARSGYQFSQGSGSTVSIARANGYSNNWSSPFNGMG

SEQ ID NO: 83 - protein, 8 aa, Setaria italica
PKLEDFLG

SEQ ID NO: 84 - protein, 14 aa, Setaria italica
MELSMIKTWLRNNQ

SEQ ID NO: 85 - protein, 371 aa, Setaria italica
IDTFGQRTSIYRGVTRHRWTGRYEAHLWDNSCRREGQSRKGRQVYLGGYDKEDKAARAYDLAALKYWGTTTTTNFPISNYEKELEEMKHMTRQEYIAYLRRNSSGFSRGASKYRGVTRHHQHGRWQARIGRVAGNKDLYLGTFSTEEEAAEAYDIAAIKFRGLNAVTNFDMSRYDVKSILESSTLPVGGAARRLKDAVDHVEAGATIWRADMDAGVISQLADAGMGAYASYGHHGWPTIAFQQPSPLTVHYPYGQPSRGWCKPEQDAAVAAAAHSLQDLQQLHLGSAAHNFFQASSSSTVYNGGGASAAGYQGLGGGGGGSFLMPSSTVVADQGHSSTANQGSTCSYGDDQDGKLIGYDAMAAAGGDPYAA

SEQ ID NO: 86 - protein, 617 aa, Triticum aestivum
MATVNNWLGFSLSPQELPPSAAASGDVSGADVCYNIPQDWNMRGSELSALVAEPKLEDFLGGISYSDHHHHQHKQPGGNNMVVPAGSASGGAACYANSGGSSVGYLYHPSSASLQFADSVMVASSGGGVHHDGAGIMANTTANGDLNGGGGGGIGLSMIKSWLRSQPSPAQAQPPEQQRAEAAAQGLSLSMNMAACIPPLVGGHRWTGRYEAHLWDNSCRREGQTRKGRQVYLGGYDKEEKAARAYDLAALKYWGATTTTNFPVNNYEKELDEMKHMTRQEFVASLRRKSSGFSRGASIYRGVTRHHQHGRWQARIGRVAGNKDLYLGTFSTQEEAAEAYDIAAIKFRGLNAVTNFDMTRYDVKSILDSTALPIGSAAKRLKDKEAATASSLALQQQQHAGVVSGYDMGALAAYGAAYHHHHPSVAGAVAWPTIAFQTPPQQVSGGGGGHMYHPYAHAQPLRGWCKQEPDHAVIAAAHSLQELHHLNLGAGGGAHDFFSQHAQAMQQQHGGLGSIDNGAGASLEHSTGSNSVVYNNGAAHEQAAAHAHARAVAAQAYSGGNMSRDHDDGKIAYENYLVSTAEAYGGGRMAAWAPASAPPATSSSDMTGTQLFSVWND

SEQ ID NO: 87 - protein, 8 aa, Triticum aestivum
PKLEDFLG

SEQ ID NO: 88 - protein, 13 aa, Triticum aestivum
IGLSMIKSWLRSQ

SEQ ID NO: 89 - protein, 383 aa, Triticum aestivum
HRWTGRYEAHLWDNSCRREGQTRKGRQVYLGGYDKEEKAARAYDLAALKYWGATTTTNFPVNNYEKELDEMKHMTRQEFVASLRRKSSGFSRGASIYRGVTRHHQHGRWQARIGRVAGNKDLYLGTFSTQEEAAEAYDIAAIKFRGLNAVTNFDMTRYDVKSILDSTALPIGSAAKRLKDKEAATASSLALQQQQHAGVVSGYDMGALAAYGAAYHHHHPSVAGAVAWPTIAFQTPPQQVSGGGGGHMYHPYAHAQPLRGWCKQEPDHAVIAAAHSLQELHHLNLGAGGGAHDFFSQHAQAMQQQHGGLGSIDNGAGASLEHSTGSNSVVYNNGAAHEQAAAHAHARAVAAQAYSGGNMSRDHDDGKIAYENYLVSTAEAYGG

SEQ ID NO: 90 - protein, 659 aa, Triticum aestivum
MASGNDWLGFSLSGQENPQPHQDSSPPADIDIAGASGFYGLPTQPAPDAQLGVPGHHQPSYGITEAFNRGAHEIHDWNMRGDLDYNGGASELSMLVGSSAVGGKRAAMEAETEPKLEDFLVGNSFVSEQDQAGGFLFSGVPMATSTNSNSRSNTMELSMIKSWLRDNQVPQAPHPQSQTGAPAQQPQPHEEMGTDASSFDPLGRNGALVVAGSSQSLALSMSTGSGSHLPMAVLGGSPSGGVSESTSSENKRASGAMDSPGGAVEAVARKSIDTFGQRTSIYRGVTRHRWTGRYEAHLWDNSCRREGQSRKGRQVYLGGYDKEDKAARAYDLAALKYWGTTTTTNFPINTYEKEVDEMKHMTRQEYIAYLRRNSSGFSRGASKYRGVTRHHQHGRWQARIGRVAGNKDLYLGTFSTEEEAAEAYDIAAIKFRGLNAVTNFDMSRYDVKTILESSTLPVGGAARRPKEVADHPEAGATIWRAGMDGGVISQLTDVGMGTYASYHHGWPTIAFQQPSPLSVHYPYVAQPSRGWCKPEQDASVATQSLQDLQQLHLGTAAHNYFQASSSSTVYNGGGYQQGTSGNAFLMPASTVVDEQGHSSTATNQGSTCSYGDEEGKLNLGYDAMAMASTGADPYAAAPTVSIARANGYSNNWSSPFNGM

SEQ ID NO: 91 - protein, 9 aa, Triticum aestivum
PKLEDFLVG

SEQ ID NO: 92 - protein, 14 aa, Triticum aestivum
MELSMIKSWLRDNQ

SEQ ID NO: 93 - protein, 365 aa, Triticum aestivum
IDTFGQRTSIYRGVTRHRWTGRYEAHLWDNSCRREGQSRKGRQVYLGGYDKEDKAARAYDLAALKYWGTTTTTNFPINTYEKEVDEMKHMTRQEYIAYLRRNSSGFSRGASKYRGVTRHHQHGRWQARIGRVAGNKDLYLGTFSTEEEAAEAYDIAAIKFRGLNAVTNFDMSRYDVKTILESSTLPVGGAARRPKEVADHPEAGATIWRAGMDGGVISQLTDVGMGTYASYHHGWPTIAFQQPSPLSVHYPYVAQPSRGWCKPEQDASVATQSLQDLQQLHLGTAAHNYFQASSSSTVYNGGGYQQGTSGNAFLMPASTVVDEQGHSSTATNQGSTCSYGDEEGKLNLGYDAMAMASTGADPYAA

SEQ ID NO: 94 - protein, 695 aa, Panicum hallii
MATVNNWLAFSLSPQDLPPSQTDSTLISAAATDEVSGDVCFNIPQDWGMRGSELSALVSEPKLEDFLGGINFSEQHHKANLNVIPSSSSTCYASSGASTGYHHQLYHHPSSALHFADSVMVASSAGVHDGGAMLSAAAANGGAGAAGANGGSIGLSMIKNWLRSQPAPPPQPRVAVAEGAQAAQGLSLSMNMAGTQGAGMPLLAGERGRAPESVSTSAQGGAVAARKEDSGGAGALVAVSTDTGGSGGASAETVARKTVDTFGQRTSIYRGVTRHRWTGRYEAHLWDNSCRREGQTRKGRQVYLGGYDKEEKAARAYDLAALKYWGPTTTTNFPVSNYEKELEEMKHMTRQEFVASLRRKSSGFSRGASIYRGVTRHHQHGRWQARIGRVAGNKDLYLGTFSTQEEAAEAYDIAAIKFRGLNAVTNFDMSRYDVKSILDSSALPIGSAAKRLKEAEAAASAQHHAGVVSYDVGRIASQLGDGGALAAYGAHYHAAAAAAWPTIAFQPGATAGLYHPYAQPLPRGWCKKEQDHAVIAAAHSLQELNHLNLGAGAHDFFSAGQAAMHGLGSIDNSSLEHSTGSNSVVYNGVGDSNGGAVGGGYMMTMSAAAATTTAMVSHEQVHARAQGDHDEASKHAAQMGYESYLMNAEAAYGGGRMPSWTPASAPPVAAAASSNDNMAGVGHGGAQLFSVWNDT

SEQ ID NO: 95 - protein, 8 aa, Panicum hallii
PKLEDFLG

SEQ ID NO: 96 - protein, 13 aa, Panicum hallii
IGLSMIKNWLRSQ

SEQ ID NO: 97 - protein, 481 aa, Panicum hallii
VAVAEGAQAAQGLSLSMNMAGTQGAGMPLLAGERGRAPESVSTSAQGGAVAARKEDSGGAGALVAVSTDTGGSGGASAETVARKTVDTFGQRTSIYRGVTRHRWTGRYEAHLWDNSCRREGQTRKGRQVYLGGYDKEEKAARAYDLAALKYWGPTTTTNFPVSNYEKELEEMKHMTRQEFVASLRRKSSGFSRGASIYRGVTRHHQHGRWQARIGRVAGNKDLYLGTFSTQEEAAEAYDIAAIKFRGLNAVTNFDMSRYDVKSILDSSALPIGSAAKRLKEAEAAASAQHHAGVVSYDVGRIASQLGDGGALAAYGAHYHAAAAAAWPTIAFQPGATAGLYHPYAQPLPRGWCKKEQDHAVIAAAHSLQELNHLNLGAGAHDFFSAGQAAMHGLGSIDNSSLEHSTGSNSVVYNGVGDSNGGAVGGGYMMTMSAAAATTTAMVSHEQVHARAQGDHDEASKHAAQMGYESYLMNAEAAYGG

SEQ ID NO: 98 - protein, 683 aa, Panicum hallii
MASANNWLGFSLSGQDNPQPNQDSSPAAGIDISGASDFYGLPTQQGSDGHLGVPGLRDDHASYGIMEAFNRGQQETQDWNMRGLDYNGGASELSMLVGSSGGAGGGTGKRAVEDSEPKLEDFLGGNSFVSEQDQSGGYLFSGVPMASSTNSNSGSNTMELSMIKTWLRNNQVPQPQPPATHQPQPEEMSTDASASSFGCSDSLGRNGAVAGGSSQSLALSMSTGSHLPMVVAGGGNASGAAASDSTSSENKRASGAMDSPSSAIEAVPRKSIDTFGQRTSIYRGVTRHRWTGRYEAHLWDNSCRREGQSRKGRQVYLGGYDKEDKAARAYDLAALKYWGTTTTTNFPISNYEKELEEMKHMTRQEYIAYLRRNSSGFSRGASKYRGVTRHHQHGRWQARIGRVAGNKDLYLGTFSTEEEAAEAYDIAAIKFRGLNAVTNFDMSRYDVKSILESSTLPVGGAARRLKDAVDHVEAAGATIWRADMEGAGVISQLADAGMGAYASYGHHGWPTIAFQQPSPLTVHYPYGQAPSRGWCKPEQDAAVAAAAHSLQDLQQLHLGSAAHNFFQASSSSTVYNGGGGASAAGYHQGLGGGGGSFIMPSSTVVADQGHSSTANQGSTCSYGDDQEGKLIGYDAMVATAAGGDPYAAARSGYQFSQGSGSTVSIARANGYSNNWSSPFNGMG

SEQ ID NO: 99 - protein, 8 aa, Panicum hallii
PKLEDFLG

SEQ ID NO: 100 - protein, 14 aa, Panicum hallii
MELSMIKTWLRNNQ

SEQ ID NO: 101 - protein, 377 aa, Panicum hallii
IDTFGQRTSIYRGVTRHRWTGRYEAHLWDNSCRREGQSRKGRQVYLGGYDKEDKAARAYDLAALKYWGTTTTTNFPISNYEKELEEMKHMTRQEYIAYLRRNSSGFSRGASKYRGVTRHHQHGRWQARIGRVAGNKDLYLGTFSTEEEAAEAYDIAAIKFRGLNAVTNFDMSRYDVKSILESSTLPVGGAARRLKDAVDHVEAAGATIWRADMEGAGVISQLADAGMGAYASYGHHGWPTIAFQQPSPLTVHYPYGQAPSRGWCKPEQDAAVAAAAHSLQDLQQLHLGSAAHNFFQASSSSTVYNGGGGASAAGYHQGLGGGGGSFIMPSSTVVADQGHSSTANQGSTCSYGDDQEGKLIGYDAMVATAAGGDPYAA

SEQ ID NO: 102 - protein, 689 aa, Medicago truncatula
MASMNLLGFSLSPQEQHPSTQDQTVASRFGFNPNEISGSDVQGDHCYDLSSHTTPHHSLNLSHPFSIYEAFHTNNNIHTTQDWKENYNNQNLLLGTSCMNQNVNNNNQQAQPKLENFLGGHSFTDHQEYGGSNSYSSLHLPPHQPEASCGGGDGSTSNNNSIGLSMIKTWLRNQPPPPENNNNNNNESGARVQTLSLSMSTGSQSSSSVPLLNANVMSGEISSSENKQPPTTAVVLDSNQTSVVESAVPRKSVDTFGQRTSIYRGVTRHRWTGRYEAHLWDNSCRREGQTRKGRQVYLGGYDKEEKAARAYDLAALKYWGTTTTTNFPISHYEKEVEEMKHMTRQEYVASLRRKSSGFSRGASIYRGVTRHHQHGRWQARIGRVAGNKDLYLGTFSTQEEAAEAYDVAAIKFRGLSAVTNFDMSRYDVKTILESSTLPIGGAAKRLKDMEQVELNHVNVDISHRTEQDHSIINNTSHLTEQAIYAATNASNWHALSFQHQQPHHHYNANNMQLQNYPYGTQTQKLWCKQEQDSDDHSTYTTATDIHQLQLGNNNNNTHNFFGLQNIMSMDSASMDNSSGSNSVVYGGGDHGGYGGNGGYMIPMAIANDGNQNPRSNNNFGESEIKGFGYENVFGTTTDPYHAQAARNLYYQPQQLSVDQGSNWVPTAIPTLAPRTTNVSLCPPFTLLHE

SEQ ID NO: 103 - protein, 8 aa, Medicago truncatula
PKLENFLG

SEQ ID NO: 104 - protein, 13 aa, Medicago truncatula
IGLSMIKTWLRNQ

SEQ ID NO: 105 - protein, 390 aa, Medicago truncatula
VDTFGQRTSIYRGVTRHRWTGRYEAHLWDNSCRREGQTRKGRQVYLGGYDKEEKAARAYDLAALKYWGTTTTTNFPISHYEKEVEEMKHMTRQEYVASLRRKSSGFSRGASIYRGVTRHHQHGRWQARIGRVAGNKDLYLGTFSTQEEAAEAYDVAAIKFRGLSAVTNFDMSRYDVKTILESSTLPIGGAAKRLKDMEQVELNHVNVDISHRTEQDHSIINNTSHLTEQAIYAATNASNWHALSFQHQQPHHHYNANNMQLQNYPYGTQTQKLWCKQEQDSDDHSTYTTATDIHQLQLGNNNNNTHNFFGLQNIMSMDSASMDNSSGSNSVVYGGGDHGGYGGNGGYMIPMAIANDGNQNPRSNNNFGESEIKGFGYENVFGTTTDPYHA

SEQ ID NO: 106 - protein, 643 aa, Vitis vinifera
MASMNNWLGFSLSPRELPPQPENHSQNSVSRLGFNSDEISGTDVSGECFDLTSDSTAPSLNLPPPFGILEAFNRNNQPQDTNYKTTTSELSMLMGSSCSSHHNLENQEPKLENFLGCRSFADHEQKLQGYYISIGLSMIKTWLRNQPAPTHQDNNKSTDTGPVGGAAAGNLPNAQTLSLSMSTGSHQTGAIETVPRKSIDTFGQRTSIYRGVTRHRWTGRYEAHLWDNSCRREGQTRKGRQVYLGGYDKEEKAARAYDLAALKYWGTTTTTNFPISNYEKEIEEMKHMTRQEYVASLRRKSSGFSRGASIYRGVTRHHQHGRWQARIGRVAGNKDLYLGTFSTQEEAAEAYDIAAIKFRGLNAVTNFDMSRYDVNSILESSTLPIGGAAKRLKDAEQAEMTIDGQRTDDEMSSQLTDGINNYGAHHHGWPTVAFQQAQPFSMHYPYGHQQRAVWCKQEQDPDGTHNFQDLHQLQLGNTHNFFQPNVLHNLMSMDSSSMDHSSGSNSVIYSGGGAADGSAATGGSGSGSFQGVGYGNNIGFVMPISTVIAHEGGHGQGNGGFGDSEVKAIGYDNMFGSTDPYHARSLYYLSQQSSAGMVKGSSAYDQGSGCNNWVPTAVPTLAPRTNSLAVCHGTPTFTVWNDT

SEQ ID NO: 107 - protein, 8 aa, Vitis vinifera
PKLENFLG

SEQ ID NO: 108 - protein, 13 aa, Vitis vinifera
IGLSMIKTWLRNQ

SEQ ID NO: 109 - protein, 435 aa, Vitis vinifera
IDTFGQRTSIYRGVTRHRWTGRYEAHLWDNSCRREGQTRKGRQVYLGGYDKEEKAARAYDLAALKYWGTTTTTNFPISNYEKEIEEMKHMTRQEYVASLRRKSSGFSRGASIYRGVTRHHQHGRWQARIGRVAGNKDLYLGTFSTQEEAAEAYDIAAIKFRGLNAVTNFDMSRYDVNSILESSTLPIGGAAKRLKDAEQAEMTIDGQRTDDEMSSQLTDGINNYGAHHHGWPTVAFQQAQPFSMHYPYGHQQRAVWCKQEQDPDGTHNFQDLHQLQLGNTHNFFQPNVLHNLMSMDSSSMDHSSGSNSVIYSGGGAADGSAATGGSGSGSFQGVGYGNNIGFVMPISTVIAHEGGHGQGNGGFGDSEVKAIGYDNMFGSTDPYHARSLYYLSQQSSAGMVKGSSAYDQGSGCNNWVPTAVPTLAPRTNSLAVCHG

SEQ ID NO: 110 - protein, 579 aa, Brassica napus
MNNNWLGFSLSPYEQNHHRKDVYSSTTTTVVDVAGEYCYDPTAASDESSAIQTSFPSPFGVVVDAFTRDNNSHSRDWDINGCACNNIHNDEQDGPKLENFLGRTTTIYNTNENVGDGSGSGCYGGGDGGGGSLGLSMIKTWLRNQPVDNVDNQENGNAAKGLSLSMNSSTSCDNNNDSNNNVVAQGKTIDDSVEATPKKTIESFGQRTSIYRGVTRHRWTGRYEAHLWDNSCKREGQTRKGRQVYLGGYDKEEKAARAYDLAALKYWGTTTTTNFPMSEYEKEVEEMKHMTRQEYVASLRRKSSGFSRGASIYRGVTRHHQHGRWQARIGRVAGNKDLYLGTFGTQEEAAEAYDIAAIKFRGLTAVTNFDMNRYNVKAILESPSLPIGSAAKRLKEANRPVPSMMMISNNVSESENSASGWQNAAVQHHQGVDLSLLHQHQERYNGYYYNGGNLSSESARACFKQEDDQHHFLSNTQSLMTNIDHQSSVSDDSVTVCGNVVGYGGYQGFAAPVNCDAYAASEFDYNARNHYYFAQQQQTQQSPGGDFPAAMTNNVGSNMYYHGEGGGEVAPTFTVWNDN

SEQ ID NO: 111 - protein, 8 aa, Brassica napus
PKLENFLG

SEQ ID NO: 112 - protein, 13 aa, Brassica napus
LGLSMIKTWLRNQ

SEQ ID NO: 113 - protein, 369 aa, Brassica napus
IESFGQRTSIYRGVTRHRWTGRYEAHLWDNSCKREGQTRKGRQVYLGGYDKEEKAARAYDLAALKYWGTTTTTNFPMSEYEKEVEEMKHMTRQEYVASLRRKSSGFSRGASIYRGVTRHHQHGRWQARIGRVAGNKDLYLGTFGTQEEAAEAYDIAAIKFRGLTAVTNFDMNRYNVKAILESPSLPIGSAAKRLKEANRPVPSMMMISNNVSESENSASGWQNAAVQHHQGVDLSLLHQHQERYNGYYYNGGNLSSESARACFKQEDDQHHFLSNTQSLMTNIDHQSSVSDDSVTVCGNVVGYGGYQGFAAPVNCDAYAASEFDYNARNHYYFAQQQQTQQSPGGDFPAAMTNNVGSNMYYHGEGGGEV

SEQ ID NO: 114 - protein, 650 aa, Cucumis sativus
MGSINWLGFSLSPQHQPSDHAHAAAATAPFTSDQISPSDVSAVCFDNLPSSYAVYEHSQDWNNMKGLGSTQSSDFSALIESQHQPKLENFLGHHSFTDHDHDHATAAVYTNASANYIFQNSSLDLPSEAAGCGGGRPSAGNGNANNTTSIGLSMIKTWLRNQPAPPQVVAKGGGDHDGSAVGISNHLTTAHTLSLSMNTGPPPPSQSSSGSAALPLLTASGGESSSSDNKQGKSSGASIDAENGAVEAAPRKSVDTFGQRTSIYRGVTRHRWTGRYEAHLWDNSCRREGQTRKGRQVYLGGYDKEEKAARAYDLAALKYWGTTTTTNFPISDYEKELEDMKHMTRQEFVASLRRKSSGFSRGASIYRGVTRHHQHGRWQARIGRVAGNKDLYLGTFGTQEEAAEAYDIAAIKFRGLNAVTNFDMSRYDVKAILESNTLPIGGAAKRLKDIHHSDIPLDPQRAEDNITSHLSDGIINITSTTTPYSGGGWPTIAFHHHHPYAFHYPYATPQQRMWCKQEQDATAIAADNFFPHGGAMDSMDHSSGSYSSANGDGYNGNFLIPMGAEGSSSNNGGLGDIGEVNLFGGCSNVDDPFHATRTSNLYNYHNSSHQLQPPPPPSGLQGSNCNNWLPPARSVCQGGAPPPFTIWNDT

SEQ ID NO: 115 - protein, 8 aa, Cucumis sativus
PKLENFLG

SEQ ID NO: 116 - protein, 13 aa, Cucumis sativus
IGLSMIKTWLRNQ

SEQ ID NO: 117 - protein, 387 aa, Cucumis sativus
VDTFGQRTSIYRGVTRHRWTGRYEAHLWDNSCRREGQTRKGRQVYLGGYDKEEKAARAYDLAALKYWGTTTTTNFPISDYEKELEDMKHMTRQEFVASLRRKSSGFSRGASIYRGVTRHHQHGRWQARIGRVAGNKDLYLGTFGTQEEAAEAYDIAAIKFRGLNAVTNFDMSRYDVKAILESNTLPIGGAAKRLKDIHHSDIPLDPQRAEDNITSHLSDGIINITSTTTPYSGGGWPTIAFHHHHPYAFHYPYATPQQRMWCKQEQDATAIAADNFFPHGGAMDSMDHSSGSYSSANGDGYNGNFLIPMGAEGSSSNNGGLGDIGEVNLFGGCSNVDDPFHATRTSNLYNYHNSSHQLQPPPPPSGLQGSNCNNWLPPARSVCQGGA

SEQ ID NO: 118 - protein, 675 aa, Gossypium hirsutum
MASMNNWLAFSLSPQEPVDHHHQSQTTVSRLGFNSDGISGTDVSGECFDLSGDSSVPSLNLPPPFGILEAFNRNSNQPQDWNMKGSELSMVMGGSSCNTQEPKLENFLGNHGCHTMYDTTTGQYPLYTTTTARTTNGGGDEDNSTNNNTNLTHGASNSNTNSGNSIGLSMIKTWLRNQPAPPPTQVETKNNGGGGSGGGGAPQSLSLSMSTGGGGGGSGGESSSSDNKKTPPQPPSTGVEITQTGTNEAVARKSIDTFGQRTSIYRGVTRHRWTGRYEAHLWDNSCRREGQSRKGRQVYLGGYDKEEKAARAYDLAALKYWGTTTTTNFPISNYEKELEEMKHMTRQEYVASLRRKSSGFSRGASMYRGVTRHHQHGRWQARIGRVAGNKDLYLGTFSTQEEAAEAYDIAAIKFRGLNAVTNFDMSRYDVKSILESSQLPIGGAAKRLKDVEQAEMAMDMVHRSDGDNINTHLPDGINTYGTSGWPTIAYQQAQPFSMHYPYGQRIWCKQEQDSDPDHAFHDLHQLQLGSTHNFFQPSVLHNLMAMESSSMEHSSGSNTNSVIYNNTVSDGAGYGGYAIPLGTVIPTDTNQNQSNDFGDNSNNEVKALGYENVYTSSDPYHSRSMYYLSQQSSSSTSQASPCNNWVPTAVPTIAQRSSNMAVCHGTPTFTVWNDT

SEQ ID NO: 119 - protein, 8 aa, Gossypium hirsutum
PKLENFLG

SEQ ID NO: 120 - protein, 13 aa, Gossypium hirsutum
IGLSMIKTWLRNQ

SEQ ID NO: 121 - protein, 411 aa, Gossypium hirsutum
IDTFGQRTSIYRGVTRHRWTGRYEAHLWDNSCRREGQSRKGRQVYLGGYDKEEKAARAYDLAALKYWGTTTTTNFPISNYEKELEEMKHMTRQEYVASLRRKSSGFSRGASMYRGVTRHHQHGRWQARIGRVAGNKDLYLGTFSTQEEAAEAYDIAAIKFRGLNAVTNFDMSRYDVKSILESSQLPIGGAAKRLKDVEQAEMAMDMVHRSDGDNINTHLPDGINTYGTSGWPTIAYQQAQPFSMHYPYGQRIWCKQEQDSDPDHAFHDLHQLQLGSTHNFFQPSVLHNLMAMESSSMEHSSGSNTNSVIYNNTVSDGAGYGGYAIPLGTVIPTDTNQNQSNDFGDNSNNEVKALGYENVYTSSDPYHSRSMYYLSQQSSSSTSQASPCNNWVPTAVPTIAQRSSNMAVCHG

SEQ ID NO: 122 - protein, 710 aa, Glycine max
MGSMNLLGFSLSPQEHPSSQDHSQTAPSRFCFNPDGISSTDVAGDCFDLTSDSTPHLLNLPSYGIYEAFHRSNNIHTTQDWKENYNSQNLLLGTSCSNQNMNHNHQQQQQQQPKLENFLGGHSFGEHEQPYGGNSASTEYMFPAQPVLAGGGGGGSNSSNTSNSSSIGLSMIKTWLRNQPPHSENNNNNNNESGGNSRSSVQQTLSLSMSTGSQSSTSLPLLTASVDNGESSSDNKQPHTTAALDTTQTGAIETAPRKSIDTFGQRTSIYRGVTRHRWTGRYEAHLWDNSCRREGQTRKGRQVYLGGYDKEEKAARAYDLAALKYWGTTTTTNFPISHYEKELEEMKHMTRQEYVASLRRKSSGFSRGASIYRGVTRHHQHGRWQARIGRVAGNKDLYLGTFSTQEEAAEAYDVAAIKFRGLSAVTNFDMSRYDVKSILESTTLPIGGAAKRLKDMEQVELRVENVHRADQEDHSSIMNSHLTQGIINNYAAGGTTATHHHNWHNALAFHQPQPCTTIHYPYGQRINWCKQEQDNSDASHSLSYSDIHQLQLGNNGTHNFFHTNSGLHPMLSMDSASIDNSSSSNSVVYDGYGGGGGYNVIPMGTTTTVVANDGDQNPRSNHGFGDNEIKALGYESVYGSTTDPYHAHARNLYYLTQQQPSSVDAVKASAYDQGSACNTWVPTAIPTHAPRSSTSMALCHGATPFSLLHE

SEQ ID NO: 123 - protein, 8 aa, Glycine max
PKLENFLG

SEQ ID NO: 124 - protein, 13 aa, Glycine max
IGLSMIKTWLRNQ

SEQ ID NO: 125 - protein, 442 aa, Glycine max
IDTFGQRTSIYRGVTRHRWTGRYEAHLWDNSCRREGQTRKGRQVYLGGYDKEEKAARAYDLAALKYWGTTTTTNFPISHYEKELEEMKHMTRQEYVASLRRKSSGFSRGASIYRGVTRHHQHGRWQARIGRVAGNKDLYLGTFSTQEEAAEAYDVAAIKFRGLSAVTNFDMSRYDVKSILESTTLPIGGAAKRLKDMEQVELRVENVHRADQEDHSSIMNSHLTQGIINNYAAGGTTATHHHNWHNALAFHQPQPCTTIHYPYGQRINWCKQEQDNSDASHSLSYSDIHQLQLGNNGTHNFFHTNSGLHPMLSMDSASIDNSSSSNSVVYDGYGGGGGYNVIPMGTTTTVVANDGDQNPRSNHGFGDNEIKALGYESVYGSTTDPYHAHARNLYYLTQQQPSSVDAVKASAYDQGSACNTWVPTAIPTHAPRSSTSMALCHG

SEQ ID NO: 126 - DNA, 300 bp, Arabidopsis thaliana
  source 1..300: mol_type = other DNA
atgacctgcgccaaggacatccagaaagcagccgccgaagcggccctcgccttccaagacgagacgtgcgatacaaccaccacgaatcatggcctcgatatggaggaaacgatggtcgaagccatctacaccccagagcagtcagaaggcgccttctacatggacgaggaaaccatgttcggcatgccgaccctcctcgacaacatggccgaaggaatgctcctcccacctccctcagttcagtggaaccacaactacgacggcgaaggcgacggagacgtttccctgtggagctactag

SEQ ID NO: 127 - protein, 99 aa, Arabidopsis thaliana
MTCAKDIQKAAAEAALAFQDETCDTTTTNHGLDMEETMVEAIYTPEQSEGAFYMDEETMFGMPTLLDNMAEGMLLPPPSVQWNHNYDGEGDGDVSLWSY

SEQ ID NO: 128 - DNA, 216 bp, Arabidopsis thaliana
  source 1..216: mol_type = other DNA
atgggcttcgacatggaggaaacgctcgttgaagccatctacaccgccgagcagagcgagaacgccttctacatgcacgacgaggccatgttcgagatgccctcactgctcgccaacatggccgaaggcatgctcctgcccctgcccagcgtgcagtggaaccataaccacgaagttgacggcgatgacgacgatgtgtctctgtggtcgtactag

SEQ ID NO: 129 - protein, 71 aa, Arabidopsis thaliana
MGFDMEETLVEAIYTAEQSENAFYMHDEAMFEMPSLLANMAEGMLLPLPSVQWNHNHEVDGDDDDVSLWSY

SEQ ID NO: 130 - DNA, 396 bp, Sorghum bicolor
  source 1..396: mol_type = other DNA
atgctgctccgcgtcgaccccgccacgctcgccacccccgacgacatccgacgcgccgccatccagctcgccgaggactcctcttcctccacgccggacgcctccgccgccgccgctgccgtggccgtggcgtcatctgcctccgtcggccaggccacgccctcgtcgtccgcgtaccaggccggggacgacgccacgggggctgcaatgtatggcgccgagtacgcggcggcggcaatgtatggcgctggcatggacttcgaccactcgtattactacgacgggatggtgggcgggaacgagtggcagagcgccggcagcagcgggtggcatagcaacgtggacgccggcgacgacgaaggcgccggcgacatgtcgctctggagctattactga

SEQ ID NO: 131 - protein, 131 aa, Sorghum bicolor
MLLRVDPATLATPDDIRRAAIQLAEDSSSSTPDASAAAAAVAVASSASVGQATPSSSAYQAGDDATGAAMYGAEYAAAAMYGAGMDFDHSYYYDGMVGGNEWQSAGSSGWHSNVDAGDDEGAGDMSLWSYY

SEQ ID NO: 132 - DNA, 342 bp, Zea mays
  source 1..342: mol_type = other DNA
atgctgctccaggtcgaccccgccacgctcgccacccccgacgacatccgccgcgccgccatccagctcgccgacgccgcctcgcagcaggatgagactgccgccgttgccgctgacgtggtcgcgccctcgcaggcggacgacgtcgccgccgccgccgccgccgcggcggcgatgtacggcggcggcatggagttcgaccactcgtattgctacgacgacgggatggtgagcgggagcagcgactgctggcaaagcggcgccggcgccggcggatggcatagcatcgtggacggcgacgacgacgacggcgccagcgacatgacgctctggagctactga

SEQ ID NO: 133 - protein, 113 aa, Zea mays
MLLQVDPATLATPDDIRRAAIQLADAASQQDETAAVAADVVAPSQADDVAAAAAAAAAMYGGGMEFDHSYCYDDGMVSGSSDCWQSGAGAGGWHSIVDGDDDDGASDMTLWSY

SEQ ID NO: 134 - DNA, 306 bp, Zea mays
  source 1..306: mol_type = other DNA
atggtgtgggcgcccaaggccgtgcggtgcacgggcggactcttcttcttccaccgggacacgacgccggcgcacgcgggcgagacggcgacgccaatggccggaggaggattaggaggagaagcagggtcgtcggaagattgcagctcagcggcgtcggtatcgcctctcgtcggaagccaggacgagccgtgcttctccggcgacggtgactgcgactggatggacgacgtgagggccctggcgtcgtttctggagtccgacgaggactggctccgctgtcagacggccgggcagcttgcgtag

SEQ ID NO: 135 - protein, 101 aa, Zea mays
MVWAPKAVRCTGGLFFFHRDTTPAHAGETATPMAGGGLGGEAGSSEDCSSAASVSPLVGSQDEPCFSGDGDCDWMDDVRALASFLESDEDWLRCQTAGQLA

SEQ ID NO: 136 - DNA, 576 bp, Zea mays
  source 1..576: mol_type = other DNA
atggtcggcagtgtcatagacgttgctgctgctggtcacggtcatggtggcggcgacatgatggatcagcagcacgccacagagtggacctttgagaggttactggaagaggaggctctgacgacaagcacaccgccgccggtggtggtggtgccgaactcttgttgctcaggcgccctaaatgttgaccggccgccggtgatggaagaggcggtaatgatggcgcctgcggcggtgagtagtgccgtagtaggggacccgatggagtacaatgccatactgaggaggaagctggaggaggacctggaggccttcaaaatgtggagggcggcctccagtgttgtgacctcagatcaacgttctcaaggctcaaacaatcacactggaggtagcagcatcaggaataatccagtgcagaacaagctgatgaacggcgaagatccaatcaacaataaccacgctcaaaccgcaggccttggcgtgaggcttgctactagctcttcctccagagatccttcaccatcagacgaagacatggacggagaagtagagattctggggttcaagatgccttag

SEQ ID NO: 137 - protein, 191 aa, Zea mays
MVGSVIDVAAAGHGHGGGDMMDQQHATEWTFERLLEEEALTTSTPPPVVVVPNSCCSGALNVDRPPVMEEAVMMAPAAVSSAVVGDPMEYNAILRRKLEEDLEAFKMWRAASSVVTSDQRSQGSNNHTGGSSIRNNPVQNKLMNGEDPINNNHAQTAGLGVRLATSSSSRDPSPSDEDMDGEVEILGFKMP

SEQ ID NO: 138 - protein, 62 aa, Zea mays
GTEDAEAVALGLGLSDFPSAGKAVLDDELSFVWPAASFDMGACWAGAGFADPDPACIFLNLP

SEQ ID NO: 139 - protein, 35 aa, Arabidopsis thaliana
QVFEFEYLDDSVLDELLEYGENYNKTHNINMGKRQ

SEQ ID NO: 140 - protein, 24 aa, Arabidopsis thaliana
EVFEFEYLDDKVLEELLDSEERKR

SEQ ID NO: 141 - protein, 26 aa, Glycine max
TFELEYLDNKLLEELLQMQDNRHFYK

SEQ ID NO: 142 - protein, 21 aa, Medicago truncatula
FDELEFLDNKLLQELLQDGTQ

SEQ ID NO: 143 - protein, 28 aa, Oryza sativa
KVELVYLDDKVLDELLAEDYSYRNNNNY

SEQ ID NO: 144 - protein, 34 aa, Human alphaherpesvirus 1
GMTHDPVSYGALDVDDFEFEQMFTDALGIDDFGG

SEQ ID NO: 145 - protein, 27 aa, Arabidopsis thaliana
EQSEGAFYMDEETMFGMPTLLDNMAEG

SEQ ID NO: 146 - protein, 28 aa, synthetic construct
EQSEGAFYMDDFFETMFTDTLLDNMAEG

SEQ ID NO: 147 - protein, 33 aa, Zea mays
SAGKAVLDDEDSFVWPAASFDMGACWAGAGFAD

SEQ ID NO: 148 - protein, 33 aa, synthetic construct
SAGKAVLDDEDFEFEAAMFTDMGACWAGAGFAD

SEQ ID NO: 149 - protein, 43 aa, Arabidopsis thaliana
GFDMEETLVEAIYTAEQSENAFYMHDEAMFEMPSLLANMAEGM

SEQ ID NO: 150 - protein, 40 aa, synthetic construct
GFDMEETLVEAIYTAEQSEDFEFEAMFEMDSLLANMAEGM

SEQ ID NO: 151 - protein, 32 aa, Nicotiana tabacum
CFTESWGDLPLKENDSEDMLVYGILNDAFHGG

SEQ ID NO: 152 - protein, 34 aa, synthetic construct
CFTESWGDLPLKENDFEFEMFTDYGILNDAFHGG

SEQ ID NO: 153 - protein, 33 aa, Nicotiana tabacum
NDSEDMLVYGLLKDAFHFDTSSSDLSCLFDFPA

SEQ ID NO: 154 - protein, 33 aa, synthetic construct
NDSEDMLVYGLLKDDFHFETSMFDLSCLFDFPA

SEQ ID NO: 155 - protein, 35 aa, Catharanthus roseus
FNENCEEIISPNYASEDLSDIILTDFKDQDNYEDE

SEQ ID NO: 156 - protein, 36 aa, synthetic construct
FNENCEEIISPNYASEDFSDLEMLTDFKDQDNYEDE

SEQ ID NO: 157 - protein, 41 aa, Solanum lycopersicum
CLTETWGDLPLKVDDSEDMVIYGLLKDALSVGWSPFSFTAG

SEQ ID NO: 158 - protein, 38 aa, Solanum lycopersicum
CLTETWGDLPLKVDDFEFEMMFTDALSVGWSPFSFTAG

SEQ ID NO: 159 - DNA, 150 bp, synthetic construct
  source 1..150: mol_type = other DNA
gacgctttggacgacttcgacttggacatgttgggttctgacgctttggacgacttcgacttggacatgttgggttctgacgctttggacgacttcgacttggacatgttgggttctgacgctttggacgacttcgacttggacatgttg

SEQ ID NO: 160 - protein, 50 aa, synthetic construct
DALDDFDLDMLGSDALDDFDLDMLGSDALDDFDLDMLGSDALDDFDLDML

SEQ ID NO: 161 - DNA, 13411 bp, synthetic construct
  source 1..13411: mol_type = other DNA
gtttacccgccaatatatcctgtcaaacactgatagtttaaactgaaggcgggaaacgacaatctgatcatgagcggagaattaagggagtcacgttatgacccccgccgatgacgcgggacaagccgttttacgtttggaactgacagaaccgcaacgttgaaggagccactcagcaagctggtacgattgtaatacgactcactatagggcgaattgagcgctgtttaaacgctcttcaactggaagagcggttacgctgtttaaacgctcttcaactggaagagcggttactaccggttcactagctagctgctaatcgagctagttaccctatgaggtgacatgaagcgctcacggttactatgacggttagcttcacgactgttggtggcagtagcgtacgacttagctatagttccggacttacccttaagcgatttaaatcctgaggatatcgctatcaactttgtatagaaaagttgggccgagctcggtacggccagaatggcccggaccgggttaccgaattcaggcgacccatcgctgctttgtctacatcatgttcttcatcatcctccccaggcgacgcgtgctgctgttcttattcagactaccgttcgagtgactgcatggcgtacatctttctgcatcgactttgtacggctacatcgaacatatacacgagatgtctcgtgtgaatagagtcactaatgccttaagcatcggttactccgtagggtacattctgttcttcttatttgtgcatatttttattgttgtttactgattatacgagtagttatacatacatgcacatacatatcatcacatatatcacaatatttttctaaattaaattaaaactaaaaatgactaaatttctaacaccaacgacattgtaatgttttctccaacaactttacctattctacattgttctatttcgaatttcactctataaacaacatagtctacaatggaaaacagtgctttgtacgactatatacgcgatgtgtggctacaacataagacaatatagtcgtttgaagattgaacctatatatcggtacggttaatccgtctatgtacgtgggcatgacgaacacccgtgataacgaaggattaacgtgcacaatcataaatccaaagtaggagcggtgcatgatgagaatcgctctcagtactcgacataatgaaccttacgaggtacaacaggcaggcaggcagggaccaggggccgcctttatttcaggctcgctggccccacgggcgtgctgcgtgcacgaagggcactaccccaacctctcaccgaaaaccgcgctggatcggcaaatcaaacgaggtggtgccccgtgcccactctccacgtccacggcaccatccctctgcagccgctcaccagccatgccgtgtcgcggaacggcacaaccacccccaacccactcacgaaaccccgtcccggccgtgcccgtgtcggtccgcgctcggcaacgaggcggcccgcgctgctgagtcccctggacacccgacaccctgtcggccctttgtttattcatcccgaaatctcatctgcccccacggccgactgcgctgcgccgcccggatatatatacccatcgttatcgactggggactctatcagtgatagagtctagaggatcgctcaggaaggccgctgagatagaggcatggcggccaatgcgggcggcggtggagcgggaggaggcagcggcagcggcagcgtggctgcgccggcggtgtgccgccccagcggctcgcggtggacgccgacgccggagcagatcaggatgctgaaggagctctactacggctgcggcatccggtcgcccagctcggagcagatccagcgcatcaccgccatgctgcggcagcacggcaagatcgagggcaagaacgtcttctactggttccagaaccacaaggcccgcgagcgccagaagcgccgcctcaccagcctcgacgtcaacgtgcccgccgccggcgcggccgacgccaccaccagccaactcggcgtcctctcgctgtcgtcgccgccgccttcaggcgcggcgcctccctcgcccaccctcggcttctacgccgccggcaatggcggcggatcggctgtgctgctggacacgagttccgactggggcagcagcggcgctgctatggccaccgagacatgcttcctgcaggactacatgggcgtgacggacacgggcagctcgtcgcagtggccacgcttctcgtcgtcggacacgataatggcggcggccgcggcgcgggcggcgacgacgcgggcgcccgagacgctccctctcttcccgacctgcggcgacgacggcggcagcggtagcagcagctacttgccgttctggggtgccgcgtccacaactgccggcgccacttcttccgttgcgatccaacagcaacaccagctgcaggagcagtacagcttttacagcaacagcaacagcacccagctggccggcaccggcaaccaagacgtatcggcaacagcagcagcagccgccgccctggagctgagcctcagctcatggtgctccccttaccctgctgcagggagtatgtgagagcaacgcgagctgccactgctcttcactggtaccgttaacagatcaattcgacaaagcagcattagtccgttgatcggtggaagaccactcgtcagtgttgagttgaatgtttgatcaataaaatacggcaatgctgtaagggttgttttttatgccattgataatacactgtactgttcagttgttgaactctatttcttagccatgccaagtgcttttcttattttgaataacattacagcaaaaagttgaaagacaaaaaaaaaaacccccgaacagagtgctttgggtcccaagcttctttagactgtgttcggcgttccccctaaatttctccccctatatctcactcacttgtcacatcagcgttctctttccccctatatctccacgctctacagcagttccacctatatcaaacctctataccccaccacaacaatattatatactttcatcttcaactaactcatgtaccttccaatttttttctactaataattatttacgtgcacagaaacttagcaaggagagagagagcggggtgacccaccttgctagttggatattacctcttctcttcaaagtatccttgaacgctcaccggttatcaaatctctacactatagctctgtagtcttgctagatagttagttctttagctctcggtgaccaagcttggcgcgatcaagcttatcgataccgtcgacctcgaagcttggtcacccggtccgggcctagaaggccagcttcaagtttgtacaaaaaagcaggctccggccagaatggcccggaccgggttaccgaattcttaccctagctccctgcggctgttacgcggtcccccatcaatcttctgttcttgcggttgtagcctgtgtaacagtgctagagtatgtatgataaataggttttaagtctgcttacatgacattttttattgtggaagagacatataaaaattagagagagtggttctcatgcaacggcggacggcccggtgctaaaagagcttcaagacaaaataatgaaacaggaagagagtagatttatctaagagccaactttattatatgaatgtgtttattgttggctttagatgatatggtaaggagttagagctaataatagataggctctattattattattattaattaaactcgctctaaggaggaaagtgggaggaagggacgaggacgaagactactggaagcatcgtgcatggatgatggatgtggtgtctcttaatgtaggtggccggaggatgtacgtgttaattgcgcgataagcactcagatccaaccgcaaactacctccacactgacacactgatagagagaaagagagacctccgacgactgccgccgcagatgagccacgtacgtatacgacgtctgccggccggctcaggctgccgccatcaccctgctcgaaagtcgcgttaggcggcgccagctacataggagtatctagtctagccagttagtatactactactgcgctgatgatgaattaactctgcatagatactgtacttgcctccctccaacacccaaccacctcctgctcggctcttaataacttggacacggatcgatgccatccaaggaagaacacgacgacgacgacggaacatccaccatgcaagcttgcatccatacgccgatacgcgtgcatccatccatccaccattatttccattttccaccgatcacacgtacacaggcctatttaaggagcgacatcccactgcaactctcctcaccactcatcaccagctagctctagcaaagcacttgccatctaccgaccgccgcattccaaacagcccgacgagctagcagagcggcaggcacctccctcctcaaggaacccatggcggagccgaagctggaggacttcctcggcggtggaggcggcagcggtggcggaggctccggaggcggtggcatcgggctgtccatgattaagaactggctgcggagccaaccggcgcccggtggtggcggctctggtggcggtggatctggtggcggtggatctgacacgttcgggcagcgcacgtcgatttaccgtggcgtgacaaggcatagatggactgggagatatgaggcacatctttgggataacagttgcagaagggaagggcaaactcgtaagggtcgtcaagtctatttaggtggctatgataaagaggagaaagctgctagggcttatgatcttgctgctctgaagtactggggtgccacaacaacaacaaattttccagtgagtaactacgaaaaggagctcgaggacatgaagcacatgacaaggcaggagtttgtagcgtctctgagaaggaagagcagtggtttctccagaggtgcatccatttacaggggagtgactaggcatcaccaacatggaagatggcaagcacggattggacgagttgcagggaacaaggatctttacttgggcaccttcagcacccaggaggaggcagcggaggcgtacgacatcgcggcgatcaagttccgcggcctcaacgccgtcaccaacttcgacatgagccgctacgacgtgaagagcatcctggacagcagcgccctccccatcggcagcgccgccaagcgcctcaaggaggccgaggccgcagcgtccgcgcagcaccaccacgccggcgtggtgagctacgacgtcggccgcatcgcctcgcagctcggcgacggcggagccctggcggcggcgtacggcgcgcactaccacggcgccgcctggccgaccatcgcgttccagccgggcgccgccagcacaggcctgtaccacccgtacgcgcagcagccaatgcgcggcggcgggtggtgcaagcaggagcaggaccacgcggtgatcgcggccgcgcacagcctgcaggacctccaccacctgaacctgggcgcggccggcgcgcacgactttttctcggcagggcagcaggccgccgccgctgcgatgcacggcctgggtagcatcgacagtgcgtcgctcgagcacagcaccggctccaactccgtcgtctacaacggcggggtcggcgacagcaacggcgccagcgccgtcggcggcagtggcggtggctacatgatgccgatgagcgctgccggagcaaccactacatcggcaatggtgagccacgagcaggtgcatgcacgggcctacgacgaagccaagcaggctgctcagatggggtacgagagctacctggtgaacgcggagaacaatggtggcggaggtggaggcggctcgggtggcggaggctccggaggcggtggctcgacgtgcgccaaggacatccaaaaagcagccgcggaggcggcactcgcctttcaggacgagacctgcgacaccaccaccaccaaccacggcctcgacatggaggagaccatggtcgaagccatctacacccccgagcagagcgagggcgccttctacatggacgaagagacaatgttcggcatgccaaccctcctcgacaacatggccgaaggcatgctgctgccgcccccgagcgtccagtggaaccacaactacgacggcgaaggcgacggggatgtgtccctgtggagctactaggcgtacctagtggtacctgacatcttatagtctgcaacctctcgtgtctgaattcctatctttatcaagtgttattgcttccacgactataggacagctttcgtcgaaaggttttgctcatgtgatctcgaaggattcatctagtctgatttttcgtgacttgtatcggttttattggattcatccaacatatatcaataaaaaatgagttgtgtttcctttcttcctagttcagttaaaattatttccctcctgcgcttgtgctgtaattgtctgtgtacctgttgtttgtgactgtgttagttcccttggatatgatttcgtatttgatatgtacatggagatagcttagcttcattattggagtatgaagttagtatgacatagtcactctcctggaaaattgacactgcaaaccatatttttattctgaaccacaaatcctagtcagtccgctggcatatgccgtccgtttgctgaatccagaacgtgggtttggagatgtacggctgagatgcctctatgcgaaggggatttcgtggtgaaacgagatgggagtagagcaacgcccgtggaagatgcttcaaacttccacacttttgagcaacgatcggcagtagtaaggtagacgatttcaagatcaaagcatatgaagataaacaacatcaacaacaaaatttgttggggttctatagagagaaacagagctacatacatacactgttttgtatctaccatctgagatgatgaaaagatgaaaaactaaagaatgccccggcgccaacgccaggacacgccgcgcgcgcgtcacccgagccatctcttgacccagccggcgctgtatatttacacacgttgcagcatcgatcaccacctgttcgatcgcgtcgccgtcaccggtaccgagctcgaattccggtccgggcctagaaggccgatctcccgggcacccagctttcttgtacaaagtggccgttaacggatcggccagaatggcccggaccgggttaccgaattcgagctcggtaccctgggatctgcccttactttaacgcctctaaccaacacccctttatctttataaggaacaataaacagaatttgccccactgttctaaatcacctaataatatccccagctaaaaacaataaaggtttcctagaattaagacaagcatgactgttcctccaggagggtttggaacattgttgcagtcttgcagatacgggcgaagggtgagaaacagagcggagggctggaggtgacctcggtagtcgacgccggagttgagcttgacaacgacggggcggcccctgatggacttgaggaagtccgatggcgtcttcaccgtcccgccggcgcccgaggcgggcctgtcgctgccgccgccgccgctgctcatcttgcgcgctgtgcccccggcggtgtccctgtgttgcggatcgcgggtgggccaggtggatgcgagggcgacccgtttggactccggccggagccgccggatccctggtcggtgtcagtgccgtttactctgggccccacgtgtcagtaccgtctgtagatgacaacaacccgtcgtccacagtcatgtccaaaatatcctttcttcttttttttcgattcggatatctatcttccttttttttttccaaaaatcttcttgacgcaccagcgcgcacgtttgtggtaaacgccgacacgtcggtcccacgtcgatagaccccacccaccagtgagtagcgtgtacgtattcgggggtgacggacgtgtcgccgtcgtcttgctagtcccattcccatctgagccacacatctctgaacaaaaaaaaggagggaggcctccacgcacatccccctccgtgccacccgccccaaaccctcgcgccgcctccgagacagccgccgcaaccatggccaccgccgccgccgcgtctaccgcgctcactggcgccactaccgctgcgcccaaggcgaggcgccgggcgcacctcctggccacccgccgcgccctcgccgcgcccatcaggtgctcagcggcgtcacccgccatgccgatggctcccccggccaccccgctccggccgtggggccccaccgagccccgcaagggtgctgacatcctcgtcgagtccctcgagcgctgcggcgtccgcgacgtcttcgcctaccccggcggcgcgtccatggagatccaccaggcactcacccgctcccccgtcatcgccaaccacctcttccgccacgagcaaggggaggcctttgccgcctccggctacgcgcgctcctcgggccgcgtcggcgtctgcatcgccacctccggccccggcgccaccaacctagtctccgcgctcgccgacgcgctgctcgattccgtccccatggtcgccatcacgggacaggtggcgcgacgcatgattggcaccgacgccttccaggagacgcccatcgtcgaggtcacccgctccatcaccaagcacaactacctggtcctcgacgtcgacgacatcccccgcgtcgtgcaggaggctttcttcctcgcctcctctggtcgaccagggccggtgcttgtcgacatccccaaggacatccagcagcagatggcggtgcctgtctgggacaagcccatgagtctgcctgggtacattgcgcgccttcccaagccccctgcgactgagttgcttgagcaggtgctgcgtcttgttggtgaatcgcggcgccctgttctttatgtgggcggtggctgcgcagcatctggtgaggagttgcgacgctttgtggagctgactggaatcccggtcacaactactcttatgggcctcggcaacttccccagcgacgacccactgtctctgcgcatgctaggtatgcatgggacggtgtatgcaaattatgcagtggataaggccgatctgttgcttgcacttggtgtgcggtttgatgatcgcgtgacagggaagattgaggcttttgcaagcagggctaagattgtgcacgttgatattgatccggctgagattggcaagaacaagcagccacatgtgtccatctgtgcagatgttaagcttgctttgcagggcatgaatgctcttcttgaaggaagcacatcaaagaagagctttgactttggctcatggaacgatgagttggatcagcagaagagggaattcccccttgggtataaaacatctaatgaggagatccagccacaatatgctattcaggttcttgatgagctgacgaaaggcgaggccatcatcggcacaggtgttgggcagcaccagatgtgggcggcacagtactacacttacaagcggccaaggcagtggttgtcttcagctggtcttggggctatgggatttggtttgccggctgctgctggtgcttctgtggcaaacccaggtgtcactgttgttgacatcgatggagatggtagctttctcatgaacgttcaggagctagctatgatccgaattgagaacctcccagtgaaggtctttgtgctaaacaaccagcacctggggatggtggtgcagttggaggacaggttctataaggccaacagagcgcacacatacttgggaaacccagagaatgaaagtgagatatatccagatttcgtgacgatcgccaaagggttcaacattccagcggtccgtgtgacaaagaagaacgaagtccgcgcagcgataaagaagatgctcgagactccagggccgtacctcttggatataatcgtcccacaccaggagcatgtgttgcctatgatccctagtggtggggctttcaaggatatgatcctggatggtgatggcaggactgtgtactgactagctagtcagttaacagatctgccagatcctcggtgtacaaataacccgtcttatcctatgagacgggccggcgtcagtgtgttctggaggaatttttatgtcagagcctttttctttgtgtgcttgatgtagatgccaagggaagcttattggctgttgaagcttgatgcaaaataaattatggaactctgttttttgtttatctaataataactagcaaatatgcttccattgcattgaaactaacagccttttgtgtttccaagttttattttgtgacaatgtcatctatttcaattagttgtggaatcggaaacttgcaggactaacttggaaactccaatccctcagcatcctggactttttcctggtgtaatccatgtagatattattttaatcatcattttagttctggaggtttttccatctccggttttgctcccctttcttcaaaaaaaaaaaaaaaatgccgtaggcgccgcaacgcccacctgttgttcaaactcatgggcacgagtggctcgaagattttatacaacaattgctgtagtttcaccgttgctggtgaagaagcatttttttaaaaaaatatagtggtattcattttaattagtttagttgtgcagcgagcaaaatttggacatgctctgctcggaatctgatcgacctagacacagattagcagcagtagctttgtcatctgttccaagagttgcgatctgatagaagaaaaaaaaaccttcccttcaatgtaaaaccgaaactaacaagaaagaagcacagtgccgtttaggcaagtatggagtacgtattaagcatgtagaaggccatgcatgaaccactaacaagaaagaagcgcagtgccattcaggcaagcataagcatgtagattggcatgcatgaacaactaacagtagatcgtctctggtctgattagaagttttttgggaagccaagaaatcatgtacaactggttccatctcaaattccgtggcaaaaagaggcctaagcaacataaagcttcggtccgggcctagaaggccattgggtcatcggatcccgggcaactttattatacaaagttgatagatatctggtctaactaactagtcctaaggacccggcggaccgaagctggccgctctagaactagtggatctcgatgtgtagtctacgagaagggttaaccgtctcttcgtgagaataaccgtggcctaaaaataagccgatgaggataaataaaatgtggtggtacagtacttcaagaggtttactcatcaagaggatgcttttccgatgagctctagtagtacatcggacctcacatacctccattgtggtgaaatattttgtgctcatttagtgatgggtaaattttgtttatgtcactctaggttttgacatttcagttttgccactcttaggttttgacaaataatttccattccgcggcaaaagcaaaacaattttattttacttttaccactcttagctttcacaatgtatcacaaatgccactctagaaattctgtttatgccacagaatgtgaaaaaaaacactcacttatttgaagccaaggtgttcatggcatggaaatgtgacataaagtaacgttcgtgtataagaaaaaattgtactcctcgtaacaagagacggaaacatcatgagacaatcgcgtttggaaggctttgcatcacctttggatgatgcgcatgaatggagtcgtctgcttgctagccttcgcctaccgcccactgagtccgggcggcaactaccatcggcgaacgacccagctgacctctaccgaccggacttgaatgcgctaccttcgtcagcgacgatggccgcgtacgctggcgacgtgcccccgcatgcatggcggcacatggcgagctcagaccgtgcgtggctggctacaaatacgtaccccgtgagtgccctagctagaaacttacacctgcaactgcgagagcgagcgtgtgagtgtagccgagtagatcccccgggctgcaggtcgactctagaggatccaccggtcgccaccatggcccacagcaagcacggcctgaaggaggagatgaccatgaagtaccacatggagggctgcgtgaacggccacaagttcgtgatcaccggcgagggcatcggctaccccttcaagggcaagcagaccatcaacctgtgcgtgatcgagggcggccccctgcccttcagcgaggacatcctgagcgccggcttcaagtacggcgaccggatcttcaccgagtacccccaggacatcgtggactacttcaagaacagctgccccgccggctacacctggggccggagcttcctgttcgaggacggcgccgtgtgcatctgtaacgtggacatcaccgtgagcgtgaaggagaactgcatctaccacaagagcatcttcaacggcgtgaacttccccgccgacggccccgtgatgaagaagatgaccaccaactgggaggccagctgcgagaagatcatgcccgtgcctaagcagggcatcctgaagggcgacgtgagcatgtacctgctgctgaaggacggcggccggtaccggtgccagttcgacaccgtgtacaaggccaagagcgtgcccagcaagatgcccgagtggcacttcatccagcacaagctgctgcgggaggaccggagcgacgccaagaaccagaagtggcagctgaccgagcacgccatcgccttccccagcgccctggcctgaagcggcccatggatattcgaacgcgtaggtaccacatggttaacctagacttgtccatcttctggattggccaacttaattaatgtatgaaataaaaggatgcacacatagtgacatgctaatcactataatgtgggcatcaaagttgtgtgttatgtgtaattactagttatctgaataaaagagaaagagatcatccatatttcttatcctaaatgaatgtcacgtgtctttataattctttgatgaaccagatgcatttcattaaccaaatccatatacatataaatattaatcatatataattaatatcaattgggttagcaaaacaaatctagtctaggtgtgttttgcgaatgcggccgccaccgcggtggagctcgaattccggtccgaagcttaagccatggcccgggaatcttagcggccgcctgcagagttaacggcgcgccgactagctagctaaggtaccgagctcgaattcattccgattaatcgtggcctcttgctcttcaggatgaagagctatgtttaaacgtgcaagcgctactagacaattcagtacattaaaaacgtccgcaatgtgttattaagttgtctaagcgtcaatttgtttacaccacaatatatcctgcca

SEQ ID NO: 162 - DNA, 7761 bp, synthetic construct
  source 1..7761: mol_type = other DNA
gtttacccgccaatatatcctgtcaaacactgatagtttaaactgaaggcgggaaacgacaatctgatcatgagcggagaattaagggagtcacgttatgacccccgccgatgacgcgggacaagccgttttacgtttggaactgacagaaccgcaacgttgaaggagccactcagcaagctggtacgattgtaatacgactcactatagggcgaattgagcgctgtttaaacgctcttcaactggaagagcggttacccggaccgaagcttgcatgcctgcagtgcagcgtgacccggtcgtgcccctctctagagataatgagcattgcatgtctaagttataaaaaattaccacatattttttttgtcacacttgtttgaagtgcagtttatctatctttatacatatatttaaactttactctacgaataatataatctatagtactacaataatatcagtgttttagagaatcatataaatgaacagttagacatggtctaaaggacaattgagtattttgacaacaggactctacagttttatctttttagtgtgcatgtgttctcctttttttttgcaaatagcttcacctatataatacttcatccattttattagtacatccatttagggtttagggttaatggtttttatagactaatttttttagtacatctattttattctattttagcctctaaattaagaaaactaaaactctattttagtttttttatttaataatttagatataaaatagaataaaataaagtgactaaaaattaaacaaataccctttaagaaattaaaaaaactaaggaaacatttttcttgtttcgagtagataatgccagcctgttaaacgccgtcgacgagtctaacggacaccaaccagcgaaccagcagcgtcgcgtcgggccaagcgaagcagacggcacggcatctctgtcgctgcctctggacccctctcgagagttccgctccaccgttggacttgctccgctgtcggcatccagaaattgcgtggcggagcggcagacgtgagccggcacggcaggcggcctcctcctcctctcacggcaccggcagctacgggggattcctttcccaccgctccttcgctttcccttcctcgcccgccgtaataaatagacaccccctccacaccctctttccccaacctcgtgttgttcggagcgcacacacacacaaccagatctcccccaaatccacccgtcggcacctccgcttcaaggtacgccgctcgtcctcccccccccccctctctaccttctctagatcggcgttccggtccatgcatggttagggcccggtagttctacttctgttcatgtttgtgttagatccgtgtttgtgttagatccgtgctgctagcgttcgtacacggatgcgacctgtacgtcagacacgttctgattgctaacttgccagtgtttctctttggggaatcctgggatggctctagccgttccgcagacgggatcgatttcatgattttttttgtttcgttgcatagggtttggtttgcccttttcctttatttcaatatatgccgtgcacttgtttgtcgggtcatcttttcatgcttttttttgtcttggttgtgatgatgtggtctggttgggcggtcgttctagatcggagtagaattctgtttcaaactacctggtggatttattaattttggatctgtatgtgtgtgccatacatattcatagttacgaattgaagatgatggatggaaatatcgatctaggataggtatacatgttgatgcgggttttactgatgcatatacagagatgctttttgttcgcttggttgtgatgatgtggtgtggttgggcggtcgttcattcgttctagatcggagtagaatactgtttcaaactacctggtgtatttattaattttggaactgtatgtgtgtgtcatacatcttcatagttacgagtttaagatggatggaaatatcgatctaggataggtatacatgttgatgtgggttttactgatgcatatacatgatggcatatgcagcatctattcatatgctctaaccttgagtacctatctattataataaacaagtatgttttataattattttgatcttgatatacttggatgatggcatatgcagcagctatatgtggatttttttagccctgccttcatacgctatttatttgcttggtactgtttcttttgtcgatgctcaccctgttgtttggtgttacttctgcaggtcgactctagaggatccatggcggagccgaagctggaggacttcctcggcggtggaggcggcagcggtggcggaggctccggaggcggtggcatcgggctgtccatgattaagaactggctgcggagccaaccggcgcccggtggtggcggctctggtggcggtggatctggtggcggtggatctgacacgttcgggcagcgcacgtcgatttaccgtggcgtgacaaggcatagatggactgggagatatgaggcacatctttgggataacagttgcagaagggaagggcaaactcgtaagggtcgtcaagtctatttaggtggctatgataaagaggagaaagctgctagggcttatgatcttgctgctctgaagtactggggtgccacaacaacaacaaattttccagtgagtaactacgaaaaggagctcgaggacatgaagcacatgacaaggcaggagtttgtagcgtctctgagaaggaagagcagtggtttctccagaggtgcatccatttacaggggagtgactaggcatcaccaacatggaagatggcaagcacggattggacgagttgcagggaacaaggatctttacttgggcaccttcagcacccaggaggaggcagcggaggcgtacgacatcgcggcgatcaagttccgcggcctcaacgccgtcaccaacttcgacatgagccgctacgacgtgaagagcatcctggacagcagcgccctccccatcggcagcgccgccaagcgcctcaaggaggccgaggccgcagcgtccgcgcagcaccaccacgccggcgtggtgagctacgacgtcggccgcatcgcctcgcagctcggcgacggcggagccctggcggcggcgtacggcgcgcactaccacggcgccgcctggccgaccatcgcgttccagccgggcgccgccagcacaggcctgtaccacccgtacgcgcagcagccaatgcgcggcggcgggtggtgcaagcaggagcaggaccacgcggtgatcgcggccgcgcacagcctgcaggacctccaccacctgaacctgggcgcggccggcgcgcacgactttttctcggcagggcagcaggccgccgccgctgcgatgcacggcctgggtagcatcgacagtgcgtcgctcgagcacagcaccggctccaactccgtcgtctacaacggcggggtcggcgacagcaacggcgccagcgccgtcggcggcagtggcggtggctacatgatgccgatgagcgctgccggagcaaccactacatcggcaatggtgagccacgagcaggtgcatgcacgggcctacgacgaagccaagcaggctgctcagatggggtacgagagctacctggtgaacgcggagaacaatggtggcggaggtggaggcggctcgggtggcggaggctccggaggcggtggctcgacgtgcgccaaggacatccaaaaagcagccgcggaggcggcactcgcctttcaggacgagacctgcgacaccaccaccaccaaccacggcctcgacatggaggagaccatggtcgaagccatctacacccccgagcagagcgagggcgccttctacatggacgaagagacaatgttcggcatgccaaccctcctcgacaacatggccgaaggcatgctgctgccgcccccgagcgtccagtggaaccacaactacgacggcgaaggcgacggggatgtgtccctgtggagctactaggcgtacgtgccggcctggctctccgaaagggcgaattccagcacactggcggccgttactagacccaacctagacttgtccatcttctggattggccaacttaattaatgtatgaaataaaaggatgcacacatagtgacatgctaatcactataatgtgggcatcaaagttgtgtgttatgtgtaattactagttatctgaataaaagagaaagagatcatccatatttcttatcctaaatgaatgtcacgtgtctttataattctttgatgaaccagatgcatttcattaaccaaatccatatacatataaatattaatcatatataattaatatcaattgggttagcaaaacaaatctagtctaggtgtgttttgcgaatgcggccgccaccgcggtggagctcgaattccggtccgggtcacctttgtccaccaagatggaactgcggccgctcattaattaagtcaggcgcgcctctagttgaagacacgttcatgtcttcatcgtaagaagacactcagtagtcttcggccagaatggccatctggattcagcaggcctagaaggccatttaaatcctgaggatctggtcttcctaaggacccgggatatcggaccgattaaactttaattcggtccgaagcttgcatgcctgcagtgcagcgtgacccggtcgtgcccctctctagagataatgagcattgcatgtctaagttataaaaaattaccacatattttttttgtcacacttgtttgaagtgcagtttatctatctttatacatatatttaaactttactctacgaataatataatctatagtactacaataatatcagtgttttagagaatcatataaatgaacagttagacatggtctaaaggacaattgagtattttgacaacaggactctacagttttatctttttagtgtgcatgtgttctcctttttttttgcaaatagcttcacctatataatacttcatccattttattagtacatccatttagggtttagggttaatggtttttatagactaatttttttagtacatctattttattctattttagcctctaaattaagaaaactaaaactctattttagtttttttatttaataatttagatataaaatagaataaaataaagtgactaaaaattaaacaaataccctttaagaaattaaaaaaactaaggaaacatttttcttgtttcgagtagataatgccagcctgttaaacgccgtcgacgagtctaacggacaccaaccagcgaaccagcagcgtcgcgtcgggccaagcgaagcagacggcacggcatctctgtcgctgcctctggacccctctcgagagttccgctccaccgttggacttgctccgctgtcggcatccagaaattgcgtggcggagcggcagacgtgagccggcacggcaggcggcctcctcctcctctcacggcaccggcagctacgggggattcctttcccaccgctccttcgctttcccttcctcgcccgccgtaataaatagacaccccctccacaccctctttccccaacctcgtgttgttcggagcgcacacacacacaaccagatctcccccaaatccacccgtcggcacctccgcttcaaggtacgccgctcgtcctcccccccccccctctctaccttctctagatcggcgttccggtccatgcatggttagggcccggtagttctacttctgttcatgtttgtgttagatccgtgtttgtgttagatccgtgctgctagcgttcgtacacggatgcgacctgtacgtcagacacgttctgattgctaacttgccagtgtttctctttggggaatcctgggatggctctagccgttccgcagacgggatcgatttcatgattttttttgtttcgttgcatagggtttggtttgcccttttcctttatttcaatatatgccgtgcacttgtttgtcgggtcatcttttcatgcttttttttgtcttggttgtgatgatgtggtctggttgggcggtcgttctagatcggagtagaattctgtttcaaactacctggtggatttattaattttggatctgtatgtgtgtgccatacatattcatagttacgaattgaagatgatggatggaaatatcgatctaggataggtatacatgttgatgcgggttttactgatgcatatacagagatgctttttgttcgcttggttgtgatgatgtggtgtggttgggcggtcgttcattcgttctagatcggagtagaatactgtttcaaactacctggtgtatttattaattttggaactgtatgtgtgtgtcatacatcttcatagttacgagtttaagatggatggaaatatcgatctaggataggtatacatgttgatgtgggttttactgatgcatatacatgatggcatatgcagcatctattcatatgctctaaccttgagtacctatctattataataaacaagtatgttttataattattttgatcttgatatacttggatgatggcatatgcagcagctatatgtggatttttttagccctgccttcatacgctatttatttgcttggtactgtttcttttgtcgatgctcaccctgttgtttggtgttacttctgcaggtcgactttaacttagcctaggatccacacgacaccatgtcccccgagcgccgccccgtcgagatccgcccggccaccgccgccgacatggccgccgtgtgcgacatcgtgaaccactacatcgagacctccaccgtgaacttccgcaccgagccgcagaccccgcaggagtggatcgacgacctggagcgcctccaggaccgctacccgtggctcgtggccgaggtggagggcgtggtggccggcatcgcctacgccggcccgtggaaggcccgcaacgcctacgactggaccgtggagtccaccgtgtacgtgtcccaccgccaccagcgcctcggcctcggctccaccctctacacccacctcctcaagagcatggaggcccagggcttcaagtccgtggtggccgtgatcggcctcccgaacgacccgtccgtgcgcctccacgaggccctcggctacaccgcccgcggcaccctccgcgccgccggctacaagcacggcggctggcacgacgtcggcttctggcagcgcgacttcgagctgccggccccgccgcgcccggtgcgcccggtgacgcagatctgagtcgaaacctagacttgtccatcttctggattggccaacttaattaatgtatgaaataaaaggatgcacacatagtgacatgctaatcactataatgtgggcatcaaagttgtgtgttatgtgtaattactagttatctgaataaaagagaaagagatcatccatatttcttatcctaaatgaatgtcacgtgtctttataattctttgatgaaccagatgcatttcattaaccaaatccatatacatataaatattaatcatatataattaatatcaattgggttagcaaaacaaatctagtctaggtgtgttttgcgaattgcggccgccaccgcggtggagctcgaattcattccgattaatcgtggcctcttgctcttcaggatgaagagctatgtttaaacgtgcaagcgctactagacaattcagtacattaaaaacgtccgcaatgtgttattaagttgtctaagcgtcaatttgtttacaccacaatatatcctgccac

SEQ ID NO: 163 - DNA, 19359 bp, synthetic construct
  source 1..19359: mol_type = other DNA
gtttacccgccaatatatcctgtcaaacactgcggccgcacttgaccgcggatggagccggagctgtggtgaggccatcgacgggaggtgggggagaacacagtctcagtgttctttgtgagtccgcaaggtttttagcttttctgtattaattaaggttgctgttggctgtagaatacggtcgtggaagagctgtatcggtagctactacgtaagctattatatactggaagtctggagctcgtcgatctccggtcgtcttcctccatttctcctcgtcttgctttgactgctgctaccatttgcttctgttttctgatgaagcatgccatgtcggccaccagtgtttgtgtggtttttgcagggaatggctttcaagtgctgtgattgaatggccctcgtcgtcctcggctgagctcacatggacgcgtcatgtgagtgagatatatgatcatatgatgagtggggttcgggtgagtgcgtacttgaagtaggatcccgctttcactcattcattcattggcctttaaaccgggaaattttcgcgaggagatggagggaagcaagcagggtgacgagtgcagagtgccgcgagcgctttgtcaaaaggcaccgccgtaggcaaaaaaatcaatggccctgactgactcgatggtagtactactgtagagactagagagggttgctccccatatcttcgtgtgacttttactccagcattgcatttccgtcattgagacgttaattaatagcagctttcgggacagatgactgtggccatgtttcgtcacggccgcttcgtgccagctgggggtactatagtactgtgattttgttagtaaaaactttcattaggccaccattgacgaccgggccttcgcttttgctgcgctaattaaccatttcccggcgaccgaagggaacatgaacatgccccgacacatgagggcatgaggactagtgttctccctgtcgttcgttgacttgactagtgatagtttaaacgctcttcaactggaagagcggttactaccggttcactagctagctgctaatcgagctagttaccctatgaggtgacatgaagcgctcacggttactatgacggttagcttcacgactgttggtggcagtagcgtacgacttagctatagttccggacttacctagctaataacttcgtatagcatacattatacgaagttatggttaccgaattcgagctcggtaccctggttcacaaactcaatacaacacacagtggagtagggtattacgctccggcggcccgaaccactctaaatccttgtgtcctcgtgtgctcttccaccattaatgactgtaattgcagggacacgaagagttgtagcgcttttgccaacaagatccgctatatgctagtagagtggaacctgcacagcaacaagcatccaataatctgagaataagaattatgtgtggtgatggttctcatctctgcaactcgccattttcgcgagagaaccaaatccaagttggtgaagatcatgatttgggctcatgggctggcatagtagctattacctttgcaattgtggttcgaatctatccgatattctccttttcagggagagctaatgcttatgcttattgggtattttggtttgacactgcttcacgcccaaaaaaaggcaactatgtctgagttggatatggcccaaaaaaaggcagctatgtctgagttggatatggaagtcttctttcgtttagggtgaagtaagaccaagctcatgagcttattatcttaggtcggaacaaattagttgataggcatggcacatttatcaaattataatgattttaacagaaaagcaacacctctttttcagcagcaccagctttgcaagctgcaattgacactccaagcatagtatttgctccaaactcagcctgcatttcgcacaatatcatatctatttccatttggataaaatatattttccagaaatatgggaacagaatcaagatacagaaaaaagttgtggtagtagtggtaagtggaaacacaagtacagtgaaaagatagcattatttctgaacagtcaaattaaccgaaataagtagtatcacatactgcccctaaattgactacacccaatgtaaagaattgcttgagcatattgagccatcagttgtttgtttgtgtaacggatttgacaatgcagagttcaggagcaaaaaaccgcaaaggagagaaagagggaaaggatctcctagtatcccaccttgtggcgcgccctgtcaagtgcatgatggcctggtcgatctgcgtctgctgctgcggttccatcccaacgagtgcctccgacaccttgtcgttgatcacccgcaccgcgtaggcgacccccctggcgaggaacttccgcctctcggaggccccggccgcgtcggcggcggcgccctcgagcgcgcccacgctagccgtagatgctcggtgcacggccttgttggtgtgcaactcgacctcaacggccggtgcgctacgcccgtcaaggatctggcgcgcccgcaccctcgtgatcacggtgggcgcctcccgcctcatgtggccgacgatgaaaagcgccgggttaggggccttggcgcgcaccgccgtattcagggcctcctcgctcttgcgcgagagcaggtgcttccccaggtactcctgcactgacaaggctgccacagcggtggaatttgtcctcacgacttcgccacgtcgtcctcacctccctggcttcccacgactccgccgtatcgaggtgctcggtgggtcgtcttaatccgaagtccgaactaggaagacgagacagagaggtctgaggaatgggcctcgtttgatgttgagctgaattatttttccagcataagcccaggtcttggtccatgaacaaaattactagaaacccagcccagtactacgatctaaaagagggactgccactggatagctctctctagcattctccacgctccaatacagcggcgtcgtgtctatccgggtctatccgcgaacacgtgagaactctccagaaactgctttctcctccacttcatctctctcgctttccctctataaaaagaccccttctaggaattgagggagacagcaagcaccaagcagcgatccgaagctcaatcaattcactcaaacctcttccccaaatcttcgattagatcttcgttgacaagaagactagaaccgaacctgacatgtccaacctgctcacggttcaccagaaccttccggctcttccagtggacgcgacgtccgatgaagtcaggaagaacctcatggacatgttccgcgacaggcaagcgttcagcgagcacacctggaagatgctgctctccgtctgccgctcctgggctgcatggtgcaagctgaacaacaggaagtggttccccgctgagcccgaggacgtgagggattaccttctgtacctgcaagcgcgaggtttgtttctgcttctacctttgatatatatataataattatcattaattagtagtaatataatatttcaaatatttttttcaaaataaaagaatgtagtatatagcaattgcttttctgtagtttataagtgtgtatattttaatttataacttttctaatatatgaccaaaacatggtgatgcctaggtctggcagtgaagaccatccagcaacaccttggacaactgaacatgcttcacaggcgctccggcctcccgcgccccagcgactcgaacgccgtgagcctcgtcatgcgccgcatcaggaaggaaaacgtcgatgccggcgaaagggcaaagcaggccctcgcgttcgagaggaccgatttcgaccaggtccgcagcctgatggagaacagcgacaggtgccaggacattaggaacctggcgttcctcggaattgcatacaacacgctcctcaggatcgcggaaattgcccgcattcgcgtgaaggacattagccgcaccgacggcggcaggatgcttatccacattggcaggaccaagacgctcgtttccaccgcaggcgtcgaaaaggccctcagcctcggagtgaccaagctcgtcgaacgctggatctccgtgtccggcgtcgcggacgacccaaacaactacctcttctgccgcgtccgcaagaacggggtggctgcccctagcgccaccagccaactcagcacgagggccttggaaggtattttcgaggccacccaccgcctgatctacggcgcgaaggatgacagcggtcaacgctacctcgcatggtccgggcactccgcccgcgttggagctgctagggacatggcccgcgccggtgtttccatccccgaaatcatgcaggcgggtggatggacgaacgtgaacattgtcatgaactacattcgcaaccttgacagcgagacgggcgcaatggttcgcctcctggaagatggtgactgaggtacccaacctagacttgtccatcttctggattggccaacttaattaatgtatgaaataaaaggatgcacacatagtgacatgctaatcactataatgtgggcatcaaagttgtgtgttatgtgtaattactagttatctgaataaaagagaaagagatcatccatatttcttatcctaaatgaatgtcacgtgtctttataattctttgatgaaccagatgcatttcattaaccaaatccatatacatataaatattaatcatatataattaatatcaattgggttagcaaaacaaatctagtctaggtgtgttttgcgatccgatcgaggccggccacactgatagtttaaactgaaggcgggaaacgacaatctgatcatgagcggagaattaagggagtcacgttatgacccccgccgatgacgcgggacaagccgttttacgtttggaactgacagaaccgcaacgattgaaggagccactcagccgcgggtttctggagtttaatgagctaagcacatacgtcagaaaccattattgcgcgttcaaaagtcgcctaaggtcactatcagctagcaaatatttcttgtcaaaaatgctccactgacgttccataaattcccctcggtatccaattagagtctcatattcactctcccggcggatctcgactctagaggatcgctcaggaaggccgctgagatagagccatggcggccaatgcgggcggcggtggagcgggaggaggcagcggcagcggcagcgtggctgcgccggcggtgtgccgccccagcggctcgcggtggacgccgacgccggagcagatcaggatgctgaaggagctctactacggctgcggcatccggtcgcccagctcggagcagatccagcgcatcaccgccatgctgcggcagcacggcaagatcgagggcaagaacgtcttctactggttccagaaccacaaggcccgcgagcgccagaagcgccgcctcaccagcctcgacgtcaacgtgcccgccgccggcgcggccgacgccaccaccagccaactcggcgtcctctcgctgtcgtcgccgccgccttcaggcgcggcgcctccctcgcccaccctcggcttctacgccgccggcaatggcggcggatcggctgtgctgctggacacgagttccgactggggcagcagcggcgctgctatggccaccgagacatgcttcctgcaggactacatgggcgtgacggacacgggcagctcgtcgcagtggccacgcttctcgtcgtcggacacgataatggcggcggccgcggcgcgggcggcgacgacgcgggcgcccgagacgctccctctcttcccgacctgcggcgacgacggcggcagcggtagcagcagctacttgccgttctggggtgccgcgtccacaactgccggcgccacttcttccgttgcgatccaacagcaacaccagctgcaggagcagtacagcttttacagcaacagcaacagcacccagctggccggcaccggcaaccaagacgtatcggcaacagcagcagcagccgccgccctggagctgagcctcagctcatggtgctccccttaccctgctgcagggagtatgtgagagcaacgcgagctgccactgctcttcactgatgtctctggaatggaaggaggaggaagtgagaacagatcattcgacaaagcagcattagtccgttgatcggtggaagaccactcgtcagtgttgagttgaatgtttgatcaataaaatacggcaatgctgtaagggttgttttttatgccattgataatacactgtactgttcagttgttgaactctatttcttagccatgccaagtgcttttcttattttgaataacattacagcaaaaagttgaaagacaaaaaaaaaaacccccgaacagagtgctttgggtcccaagcttctttagactgtgttcggcgttccccctaaatttctccccctatatctcactcacttgtcacatcagcgttctctttccccctatatctccacgctctacagcagttccacctatatcaaacctctataccccaccacaacaatattatatactttcatcttcaactaactcatgtaccttccaatttttttctactaataattatttacgtgcacagaaacttagcaaggagagagagagcgggaatttaaatgctcggcgttaggcttttagtccgctaggtggctagaccgaggttaggacgctagttcactaggggcctagtggtgttttaagacgtcacggtcacccggtccgggcctagaaggccagcttcaagtttgtacaaaaaagcaggctccggccagaatggcccggaccgaagcttgcatgcctgcagtgcagcgtgacccggtcgtgcccctctctagagataatgagcattgcatgtctaagttataaaaaattaccacatattttttttgtcacacttgtttgaagtgcagtttatctatctttatacatatatttaaactttactctacgaataatataatctatagtactacaataatatcagtgttttagagaatcatataaatgaacagttagacatggtctaaaggacaattgagtattttgacaacaggactctacagttttatctttttagtgtgcatgtgttctcctttttttttgcaaatagcttcacctatataatacttcatccattttattagtacatccatttagggtttagggttaatggtttttatagactaatttttttagtacatctattttattctattttagcctctaaattaagaaaactaaaactctattttagtttttttatttaataatttagatataaaatagaataaaataaagtgactaaaaattaaacaaataccctttaagaaattaaaaaaactaaggaaacatttttcttgtttcgagtagataatgccagcctgttaaacgccgtcgacgagtctaacggacaccaaccagcgaaccagcagcgtcgcgtcgggccaagcgaagcagacggcacggcatctctgtcgctgcctctggacccctctcgagagttccgctccaccgttggacttgctccgctgtcggcatccagaaattgcgtggcggagcggcagacgtgagccggcacggcaggcggcctcctcctcctctcacggcaccggcagctacgggggattcctttcccaccgctccttcgctttcccttcctcgcccgccgtaataaatagacaccccctccacaccctctttccccaacctcgtgttgttcggagcgcacacacacacaaccagatctcccccaaatccacccgtcggcacctccgcttcaaggtacgccgctcgtcctcccccccccccctctctaccttctctagatcggcgttccggtccatgcatggttagggcccggtagttctacttctgttcatgtttgtgttagatccgtgtttgtgttagatccgtgctgctagcgttcgtacacggatgcgacctgtacgtcagacacgttctgattgctaacttgccagtgtttctctttggggaatcctgggatggctctagccgttccgcagacgggatcgatttcatgattttttttgtttcgttgcatagggtttggtttgcccttttcctttatttcaatatatgccgtgcacttgtttgtcgggtcatcttttcatgcttttttttgtcttggttgtgatgatgtggtctggttgggcggtcgttctagatcggagtagaattctgtttcaaactacctggtggatttattaattttggatctgtatgtgtgtgccatacatattcatagttacgaattgaagatgatggatggaaatatcgatctaggataggtatacatgttgatgcgggttttactgatgcatatacagagatgctttttgttcgcttggttgtgatgatgtggtgtggttgggcggtcgttcattcgttctagatcggagtagaatactgtttcaaactacctggtgtatttattaattttggaactgtatgtgtgtgtcatacatcttcatagttacgagtttaagatggatggaaatatcgatctaggataggtatacatgttgatgtgggttttactgatgcatatacatgatggcatatgcagcatctattcatatgctctaaccttgagtacctatctattataataaacaagtatgttttataattattttgatcttgatatacttggatgatggcatatgcagcagctatatgtggatttttttagcactgccttcatacgctatttatttgcttggtactgtttcttttgtcgatgctcaccctgttgtttggtgttacttctgcaggtcgactttaacttagcctaggatccatggcggagccgaagctggaggacttcctcggcggtggaggcggcagcggtggcggaggctccggaggcggtggcatcgggctgtccatgattaagaactggctgcggagccaaccggcgcccggtggtggcggctctggtggcggtggatctggtggcggtggatctgacacgttcgggcagcgcacgtcgatttaccgtggcgtgacaaggcatagatggactgggagatatgaggcacatctttgggataacagttgcagaagggaagggcaaactcgtaagggtcgtcaagtctatttaggtggctatgataaagaggagaaagctgctagggcttatgatcttgctgctctgaagtactggggtgccacaacaacaacaaattttccagtgagtaactacgaaaaggagctcgaggacatgaagcacatgacaaggcaggagtttgtagcgtctctgagaaggaagagcagtggtttctccagaggtgcatccatttacaggggagtgactaggcatcaccaacatggaagatggcaagcacggattggacgagttgcagggaacaaggatctttacttgggcaccttcagcacccaggaggaggcagcggaggcgtacgacatcgcggcgatcaagttccgcggcctcaacgccgtcaccaacttcgacatgagccgctacgacgtgaagagcatcctggacagcagcgccctccccatcggcagcgccgccaagcgcctcaaggaggccgaggccgcagcgtccgcgcagcaccaccacgccggcgtggtgagctacgacgtcggccgcatcgcctcgcagctcggcgacggcggagccctggcggcggcgtacggcgcgcactaccacggcgccgcctggccgaccatcgcgttccagccgggcgccgccagcacaggcctgtaccacccgtacgcgcagcagccaatgcgcggcggcgggtggtgcaagcaggagcaggaccacgcggtgatcgcggccgcgcacagcctgcaggacctccaccacctgaacctgggcgcggccggcgcgcacgactttttctcggcagggcagcaggccgccgccgctgcgatgcacggcctgggtagcatcgacagtgcgtcgctcgagcacagcaccggctccaactccgtcgtctacaacggcggggtcggcgacagcaacggcgccagcgccgtcggcggcagtggcggtggctacatgatgccgatgagcgctgccggagcaaccactacatcggcaatggtgagccacgagcaggtgcatgcacgggcctacgacgaagccaagcaggctgctcagatggggtacgagagctacctggtgaacgcggagaacaatggtggcggaggtggaggcggctcgggtggcggaggctccggaggcggtggctcgacgtgcgccaaggacatccaaaaagcagccgcggaggcggcactcgcctttcaggacgagacctgcgacaccaccaccaccaaccacggcctcgacatggaggagaccatggtcgaagccatctacacccccgagcagagcgagggcgccttctacatggacgaagagacaatgttcggcatgccaaccctcctcgacaacatggccgaaggcatgctgctgccgcccccgagcgtccagtggaaccacaactacgacggcgaaggcgacggggatgtgtccctgtggagctactagtattggtaccgtcatgggtcgtttaagctgccgatgtgcctgcgtcgtctggtgccctctctccatatggaggttgtcaaagtatctgctgttcgtgtcatgagtcgtgtcagtgttggtttaataatggaccggttgtgttgtgtgtgcgtactacccagaactatgacaaatcatgaataagtttgatgtttgaaattaaagcctgtgctcattatgttctgtctttcagttgtctcctaatatttgcctgcaggtactggctatctaccgtttcttacttaggaggtgtttgaatgcactaaaactaatagttagtggctaaaattagttaaaacatccaaacaccatagctaatagttgaactattagctatttttggaaaattagttaatagtgaggtagttatttgttagctagctaattcaactaacaatttttagccaactaacaattagtttcagtgcattcaaacacccccttaatgttaaggtggttctatctaccgtctcctaatatatggttgattgttcggtttgttgctatgctattgggttctgattgctgctagttcttgctgaatccagaagttctcgtagtatagctcagattcatattatttatttgagtgataagtgatccaggttattactatgttagctaggttttttttacaaggataaattatctgtgatcataattcttatgaaagctttatgtttcctggaggcagtggcatgcaatgcatgacagcaacttgatcacaccagctgaggtagatacggtaacaaggttcttaaatctgttcaccaaatcattggagaacacacatacacattcttgccagtcttggttagagaaatttcatgacaaaatgccaaagctgtcttgactcttcacttttggccatgagtcgtgacgcgacttattgaactagtctagggcgcggctaacaacctagcttagattgccttgtctaaacccttaggctaacgcgccactctagaaggccgatctcccgggataacttcgtatagcatacattatacgaagttatgaattccggaccgggttaccgaattcctgcccttaaggccaattgttcaagattcattcaacaattgaaacatctcccatgattaaatcagtataaggttgctatggtcttgcttgacaaagtttttttttgagggaatttcaactaaatttttgagtgaaactatcaaatactgattttaaaaaatttttataaaaggaagcgcagagataaaaggccatctatgctacaaaagtacccaaaaatgtaatcctaaagtatgaattgcattttttttttgtttggacgaaaggaaaggagtattaccacaagaatgatatcatcttcatatttagatcttttttgggtaaagcttgagattctctaaatatagagaaatcagaagaaaaaaaaaccgtgttttggtggttttgatttctagcctccacaataactttgacggcgtcgacaagtctaacggacaccaagcagcgaaccaccagcgccgagccaagcgaagcagacggccgagacgttgacaccttcggcgcggcatctctcgagagttccgctccggcgctccacctccaccgctggcggtttcttattccgttccgttccgcctcctgctctgctcctctccacaccacacggcacgaaaccgttacggcaccggcagcacccagcacgggagaggggattcctttcccaccgttccttccctttccgccccgccgctataaatagccagccccatccccagcttttttccccaatctcatctcctctctcctgttgttcggagcacacgcacaatccgatcgatccccaaatccccttcgtctctcctcgcgagcctcgtggatcccagcttcaaggtacggcgatcgatcatcccccctccttctctctaccttcttttctctagactacatcggatggcgatccatggttagggcctgctagtttcccttcctgttttgtcgatggctgcgaggcacaatagatctgatggcgttatgacggctaacttgtcatgttgttgcgatttatagtccctttaggagatcagtttaatttctcggatggttcgagatcggtggtccatggttagtaccctaagatccgcgctgttagggttcgtagatggaggcgacctgttctgattgttaacttgtcagtacctgggaaatcctgggatggttctagctcgtccgcagatgagatcgatttcatgatcctctgtatcttgtttcgttgcctaggttccgtctaatctatccgtggtatgatgtagatgttttgatcgtgctaactacgtcttgtaaagttaattgtcaggtcataatttttagcatgcctttttttttgtttggttttgtctaattgggctgtcgttctagatcagagtagaagactgttccaaactacctgctggatttattgaacttggatctgtatgtgtgtcacatatcttcataaattcatgattaagatggattgaaatatcttttatctttttggtatggatagttctatatgttggtgtggctttgttagatgtatacatgcttagatacatgaagcaacgtgctgctactgtttagtaattgctgttcatttgtctaataaacagataaggatatgtatttatgttgctgttggttttgctggtactttgttggatacaaatgcttcaatacagaaaacagcatgctgctacgatttaccatttatctaatcttatcatatgtctaatctaataaacaaacatgcttttaaattatcttcatatgcttggatgatggcatacacagcggctatgtgtggttttttaaatacccagcatcatgggcatgcatgacactgctttaatatgctttttatttgcttgagactgtttcttttgtttatactgaccctttagttcggtgactcttctgcaggtcgactttaacttagcctaggatccatggcccagtccaagcacggcctgaccaaggagatgaccatgaagtaccgcatggagggctgcgtggacggccacaagttcgtgatcaccggcgagggcatcggctaccccttcaagggcaagcaggccatcaacctgtgcgtggtggagggcggccccttgcccttcgccgaggacatcttgtccgccgccttcatgtacggcaaccgcgtgttcaccgagtacccccaggacatcgtcgactacttcaagaactcctgccccgccggctacacctgggaccgctccttcctgttcgaggacggcgccgtgtgcatctgcaacgccgacatcaccgtgagcgtggaggagaactgcatgtaccacgagtccaagttctacggcgtgaacttccccgccgacggccccgtgatgaagaagatgaccgacaactgggagccctcctgcgagaagatcatccccgtgcccaagcagggcatcttgaagggcgacgtgagcatgtacctgctgctgaaggacggtggccgcttgcgctgccagttcgacaccgtgtacaaggccaagtccgtgccccgcaagatgcccgactggcacttcatccagcacaagctgacccgcgaggaccgcagcgacgccaagaaccagaagtggcacctgaccgagcacgccatcgcctccggctccgccttgccctccggactcagatctcgatagggtaccaatggccagttaacagatccagctgctgctgttctagggttcacaagtctgcctatttgtcttccccaatggagctatggttgtctggtctggtccttggtcgtgtcccgtttcattgtgtactatttacctgtaatgtgtatccttaagtctggtttgatggtgtctgaaacgttttgctgtggtagagcagcatggaagaactataatgaataagtgatccctaatcattgtgtccaaattttgcttctgctatacccttttgtgctgtttcttatgttttgcttaaaaatttgatctgacaaacaaatttgtctaaattatgctcttgttctgactgtgtactgtacacatttgtattgctaccggtttggcacatagttttctctttgattgcagatcaaacccttctgattgcagattgcttggctatggctgatgtgctcactgttcttctttagcttgtatattgctgatggtggcttggctacggctgaaaaagttgctgctgcgccgacttggcaactgttgctccagtaatgctttgtcctctcttcctagccgccgacttggcacttggcagctgttgctcctgtaatgcgttgttatctcttatctcttgagatgtactatgattttgaggctgtttgacttgtgccagattgccagtgctgatgctatattatctcaggtttttatgctagtatatgttttactgtgtgctgcctgtgtcgagttacgtaatctattgaaccgctatgcgtgttgatgccctgttgttgcttgccagattgatgcccctgttgcttgcagcttgcaagctgtagtgaaatcctaaaattcgaaaccaaatctattctgaacttttgaagatctgtgatgtccggaagaaaagattcaaacagataaacgggactctccagaatctataaaataaatgatcgacaaacgctttgctttggtaggcttcctagttagttagcggaccgggatccgacggcgtcttcaccgccccgccgccgcccgagccggacttgtcgctgccgccgccgctgctcatcttgcgcgcttgtgtccctccctcagtccctgcgttcgcggatcgcgggcgggtgcgacccgtttggactccggccggtagccttcgtgccgacctcgctcggtccaccggtttgtcggggacccacatgtcagtgaaggtacgcgtccacgtccacagaccctactaccccagacgagtccaaatcgctgttccctcacactctcgtgtaccagcgcgcggcggaaagcacctttccaacaaccgccgacacgtcggtcccacgtcggcatgctccaccggtcagtgtttggcgtgtacggctcccggcgacgaacgagtgtggcctaagctttcctactcccatcccatctgagccacacatctctctcacgccacgcgcacaaaacagccaggctcccacgcgcatcaaccggctctccctttccgtgccactcgcccccaagccccaaaccctcgccgccgcctccgagacagccgccgccacctaggccatggccaccgccgccgccgcgtctaccgcgctcactggcgccactaccgctgcgcccaaggcgaggcgccgggcgcacctcctggccacccgccgcgccctcgccgcgcccatcaggtgctcagcggcgtcacccgccatgccgatggctcccccggccaccccgctccggccgtggggccccaccgagccccgcaagggtgctgacatcctcgtcgagtccctcgagcgctgcggcgtccgcgacgtcttcgcctaccccggcggcgcgtcgatggagatccaccaggcactcacccgctcccccgtcatcgccaaccacctcttccgccacgagcaaggggaggcctttgccgcctccggctacgcgcgctcctcgggccgcgtcggcgtctgcatcgccacctccggccccggcgccaccaacctagtctccgcgctcgccgacgcgctgctcgattccgtcccgatggtcgccatcacgggacaggtggcgcgacgcatgattggcaccgacgccttccaggagacgcccatcgtcgaggtcacgcgctccatcaccaagcacaactacctggtcctcgacgtcgacgacatcccccgcgtcgtgcaggaggctttcttcctcgcctcctctggtcgaccagggccggtgcttgtcgacatccccaaggacatccagcagcagatggcggtgcctgtctgggacaagcccatgagtctgcctgggtacattgcgcgccttcccaagccccctgcgactgagttgcttgagcaggtgctgcgtcttgttggtgaatcgcggcgccctgttctttatgtgggcggtggctgcgcagcatctggtgaggagttgcgacgctttgtggagctgactggaatcccggtcacaactactcttatgggcctcggcaacttccccagcgacgacccactgtctctgcgcatgctaggtatgcatgggacggtgtatgcaaattatgcagtggataaggccgatctgttgcttgcacttggtgtgcggtttgatgatcgcgtgacagggaagattgaggcttttgcaagcagggctaagattgtgcacgttgatattgatccggctgagattggcaagaacaagcagccacatgtgtccatctgtgcagatgttaagcttgctttgcagggcatgaatgctcttcttgaaggaagcacatcaaagaagagctttgactttggctcatggaacgatgagttggatcagcagaagagggaattcccccttgggtataaaacatctaatgaggagatccagccacaatatgctattcaggttcttgatgagctgacgaaaggcgaggccatcatcggcacaggtgttgggcagcaccagatgtgggcggcacagtactacacttacaagcggccaaggcagtggttgtcttcagctggtcttggggctatgggatttggtttgccggctgctgctggtgcttctgtggcaaacccaggtgtcactgttgttgacatcgatggagatggtagctttctcatgaacgttcaggagctagctatgatccgaattgagaacctcccagtgaaggtctttgtgctaaacaaccagcacctggggatggtggtgcagttggaggacaggttctataaggccaacagagcgcacacatacttgggaaacccagagaatgaaagtgagatatatccagatttcgtgacgatcgccaaagggttcaacattccagccgtccgtgtgacaaagaagaacgaagtccgcgcagcgataaagaagatgctcgagactccagggccgtacctcttggatataatcgtcccacaccaggagcatgtgttgcctatgatccctagtggtggggctttcaaggatatgatcctggatggtgatggcaggactgtgtactgacttcgaataggtacccggggatcctctagtgccgtgggtcgtttaagctgccgctgtacctgtgtcgtctggtgccttctggtgtacctgggaggttgtcgtctatcaagtatctgtggttggtgtcatgagtcagtgagtcccaatactgttcgtgtcctgtgtgcattatacccaaaactgttatgggcaaatcatgaataagcttgatgttcgaacttaaaagtctctgctcaatatggtattatggttgtttttgttcgtctcctaatatttgcctgggatcaaattttattggctggtgttcatttgacctccatgttcttgctaggctccattttttactctacagccataatatgtttgattgtttggtttgttctttgttgtacacctggttctgtcgagcttagttttcgacactggcttacagcttaacatgttgctattttattgggttctgattgctattttattgggttctgattgctagtttttgctgaatccaaaaaccatgttatttatttaagcgatccaggttattattatgatggtggctaagtttttttttttccaagggtaaattttctggattctccagtgtttctgtggccgaattcaatcactagagtcgacctgcaaagcttcggtccgggcctagaaggcccgcgccacttacgcttgattccgatgacttcgtaggttcctagctcaagccgctcgtgtccaagcgtcacttacgattagctaatgattacggcatctaggaccgactagttcttatgtgcttctagtctccaaatgtggttgatagttattttgctctaagatcaacagtaatgaagtataaatcatcgttgtggtgtgctactcggttaattgagcattaacacacacaaacatgacgaggatggtataatctccaaaaatgtgtactttgttaggtgggaccctatagccttgattaatgtgctatgttaggcatgcctggaaacgtgtgacgcatatgttttgtgaacctgttgatattatatgtgcttttatattaccatattttattaaaatactaatatttattactagtaagatataacattctatctagcttaaaaactaaccataaatattccataataactagatttaccaaactaatatactaaatatacataataaatacaaaattaacaagacaataatcaatatttatgagcttaatatatttagacattatggttggtcgacgataatcatgctaacttttcgtaattgcttgattgaaatatgcttagaataatgcctctttgttctacatggcaaatagggaccattatggtgtaacaccctgggaaccacaaacaccccgaaatgctactaaactacacaactaaccttcatatataaaatttcgacagcatctcctttgaaaatttgcatagacgtggaagcaacagagtataaacagatctgcgtttaaacgtgcaagcgctactagacaattcagtacattaaaaacgtccgcaatgtgttattaagttgtctaagcgtcaatttgtttacaccacaatatatcctgcca

SEQ ID NO: 164 - protein, 146 aa, Arabidopsis thaliana
KEKRKEIEEAISKKRQRPIDQGKRNVEDYGDESGYGNDVAASSSALIGMSQEYTYGNMSEFEMSELDKLAMHIQGLGDNSSAREEVLNVEKGNDEEEVEDQQQGYHKENNEIYGEGFWEDLLNEGQNFDFEGDQENVDVGSSSHTN

SEQ ID NO: 165 - protein, 81 aa, Arabidopsis thaliana
SSDMFDVDELLRDLNGDDVFAGLNQDRYPGNSVANGSYRPESQQSGFDPLQSLNYGIPPFQLEGKDGNGFFDDLSYLDLEN

SEQ ID NO: 166 - protein, 64 aa, Zea mays
QPGTEDAEAVALGLGLSDFPSAGKAVLDDEDSFVWPAASFDMGACWAGAGFADPDPACIFLNLP

SEQ ID NO: 167 - DNA, 25983 bp, synthetic construct
  source 1..25983: mol_type = other DNA
gtttacccgccaatatatcctgtcaaacactgcggccgcacttgaccgcggatggagccggagctgtggtgaggccatcgacgggaggtgggggagaacacagtctcagtgttctttgtgagtccgcaaggtttttagcttttctgtattaattaaggttgctgttggctgtagaatacggtcgtggaagagctgtatcggtagctactacgtaagctattatatactggaagtctggagctcgtcgatctccggtcgtcttcctccatttctcctcgtcttgctttgactgctgctaccatttgcttctgttttctgatgaagcatgccatgtcggccaccagtgtttgtgtggtttttgcagggaatggctttcaagtgctgtgattgaatggccctcgtcgtcctcggctgagctcacatggacgcgtcatgtgagtgagatatatgatcatatgatgagtggggttcgggtgagtgcgtacttgaagtaggatcccgctttcactcattcattcattggcctttaaaccgggaaattttcgcgaggagatggagggaagcaagcagggtgacgagtgcagagtgccgcgagcgctttgtcaaaaggcaccgccgtaggcaaaaaaatcaatggccctgactgactcgatggtagtactactgtagagactagagagggttgctccccatatcttcgtgtgacttttactccagcattgcatttccgtcattgagacgttaattaatagcagctttcgggacagatgactgtggccatgtttcgtcacggccgcttcgtgccagctgggggtactatagtactgtgattttgttagtaaaaactttcattaggccaccattgacgaccgggccttcgcttttgctgcgctaattaaccatttcccggcgaccgaagggaacatgaacatgccccgacacatgagggcatgaggactagtgttctccctgtcgttcgttgacttgactagtgatagtttaaacgctcttcaactggaagagcggttactaccggttcactagctagctgctaatcgagctagttaccctatgaggtgacatgaagcgctcacggttactatgacggttagcttcacgactgttggtggcagtagcgtacgacttagctatagttccggacttacccttaagataacttcgtatagcatacattatacgaagttatgggcccacgcgtgaagagcggttaccagagctggtcacctttgtccaccaagatggaactgtcttcggccagaatggccatctggattcagcaggcctagaaggccatttatcgctatcaactttgtatagaaaagttgggccgaattcgagctcggtacggccagaatggcccggaccgaagcttgcatgcctgcagcccatccctcagccgcctttcactatcttttttgcccgagtcattgtcatgtgaaccttggcatgtataatcggtgaattgcgtcgattttcctcttataggtgggccaatgaatccgtgtgatcgcgtctgattggctagagatatgtttcttccttgttggatgtattttcatacataatcatatgcatacaaatatttcattacactttatagaaatggtcagtaataaaccctatcactatgtctggtgtttcattttatttgcttttaaacgaaaattgacttcctgattcaatatttaaggatcgtcaacggtgtgcagttactaaattctggtttgtaggaactatagtaaactattcaagtcttcacttattgtgcactcacctctcgccacatcaccacagatgttattcacgtcttaaatttgaactacacatcatattgacacaatattttttttaaataagcgattaaaacctagcctctatgtcaacaatggtgtacataaccagcgaagtttagggagtaaaaaacatcgccttacacaaagttcgctttaaaaaataaagagtaaattttactttggaccacccttcaaccaatgtttcactttagaacgagtaattttattattgtcactttggaccaccctcaaatcttttttccatctacatccaatttatcatgtcaaagaaatggtctacatacagctaaggagatttatcgacgaatagtagctagcatactcgaggtcattcatatgcttgagaagagagtcgggatagtccaaaataaaacaaaggtaagattacctggtcaaaagtgaaaacatcagttaaaaggtggtataaagtaaaatatcggtaataaaaggtggcccaaagtgaaatttactcttttctactattataaaaattgaggatgtttttgtcggtactttgatacgtcatttttgtatgaattggtttttaagtttattcgcttttggaaatgcatatctgtatttgagtcgggttttaagttcgtttgcttttgtaaatacagagggatttgtataagaaatatctttaaaaaaacccatatgctaatttgacataatttttgagaaaaatatatattcaggcgaattctcacaatgaacaataataagattaaaatagctttcccccgttgcagcgcatgggtattttttctagtaaaaataaaagataaacttagactcaaaacatttacaaaaacaacccctaaagttcctaaagcccaaagtgctatccacgatccatagcaagcccagcccaacccaacccaacccaacccaccccagtccagccaactggacaatagtctccacacccccccactatcaccgtgagttgtccgcacgcaccgcacgtctcgcagccaaaaaaaaaaaaagaaagaaaaaaaagaaaaagaaaaaacagcaggtgggtccgggtcgtgggggccggaaacgcgaggaggatcgcgagccagcgacgaggccggccctccctccgcttccaaagaaacgccccccatcgccactatatacatacccccccctctcctcccatccccccaaccctaccaccaccaccaccaccacctccacctcctcccccctcgctgccggacgacgagctcctcccccctccccctccgccgccgccgcgccggtaaccaccccgcccctctcctctttctttctccgttttttttttccgtcacggtctcgatctttggccttggtagtttgggtgggcgagaggcggcttcgtgcgcgcccagatcggtgcgcgggaggggcgggatctcgcggctggggctctcgccggcgtggatcaggcccggatctcgcggggaatggggctctcggatgtagatctgcgatccgccgttgttgggggagatgatggggggtttaaaatttccgccatgctaaacaagatcaggaagaggggaaaagggcactatggtttatatttttatatatttctgctgcttcgtcaggcttagatgtgctagatctttctttcttctttttgtgggtagaatttgaatccctcagcattgttcatcggtagtttttcttttcatgatttgtgacaaatgcagcctcgtgcggagcttttttgtaggtagaaggatccgcccatggcggccaatgcgggcggcggtggagcgggaggaggcagcggcagcggcagcgtggctgcgccggcggtgtgccgccccagcggctcgcggtggacgccgacgccggagcagatcaggatgctgaaggagctctactacggctgcggcatccggtcgcccagctcggagcagatccagcgcatcaccgccatgctgcggcagcacggcaagatcgagggcaagaacgtcttctactggttccagaaccacaaggcccgcgagcgccagaagcgccgcctcaccagcctcgacgtcaacgtgcccgccgccggcgcggccgacgccaccaccagccaactcggcgtcctctcgctgtcgtcgccgccgccttcaggcgcggcgcctccctcgcccaccctcggcttctacgccgccggcaatggcggcggatcggctgtgctgctggacacgagttccgactggggcagcagcggcgctgctatggccaccgagacatgcttcctgcaggactacatgggcgtgacggacacgggcagctcgtcgcagtggccacgcttctcgtcgtcggacacgataatggcggcggccgcggcgcgggcggcgacgacgcgggcgcccgagacgctccctctcttcccgacctgcggcgacgacggcggcagcggtagcagcagctacttgccgttctggggtgccgcgtccacaactgccggcgccacttcttccgttgcgatccaacagcaacaccagctgcaggagcagtacagcttttacagcaacagcaacagcacccagctggccggcaccggcaaccaagacgtatcggcaacagcagcagcagccgccgccctggagctgagcctcagctcatggtgctccccttaccctgctgcagggagtatgtgagagcaacgcgagctgccactgctcttcactgatgtctctggaatggaaggaggaggaagtgagaacagatcattcgacaaagcagcattagtccgttgatcggtggaagaccactcgtcagtgttgagttgaatgtttgatcaataaaatacggcaatgctgtaagggttgttttttatgccattgataatacactgtactgttcagttgttgaactctatttcttagccatgccaagtgcttttcttattttgaataacattacagcaaaaagttgaaagacaaaaaaaaaaacccccgaacagagtgctttgggtcccaagcttctttagactgtgttcggcgttccccctaaatttctccccctatatctcactcacttgtcacatcagcgttctctttccccctatatctccacgctctacagcagttccacctatatcaaacctctataccccaccacaacaatattatatactttcatcttcaactaactcatgtaccttccaatttttttctactaataattatttacgtgcacagaaacttagcaaggagagagagagcgggaatttaaatgctcggcgttaggcttttagtccgctaggtggctagaccgaggttaggacgctagttcactaggggcctagtggtgttttaagacgtcacggtcacctgaagaaactatgtgctgtagtatagccgctgcccgctggctagctagctagttgagtcatttagcggcgatgattgagtaataatgtgtcacgcatcaccatgcatgggtggcagtgtcagtgtgagcaatgacctgaatgaacaattgaaatgaaaagaaaaaagtattgttccaaattaaacgttttaaccttttaataggtttatacaataattgatatatgttttctgtatatgtctaatttgttatcatccatttagatatagacaaaaaaaatctaagaactaaaacaaatgctaatttgaaatgaagggagtatatattgggataatgtcgatgagatccctcgtaatatcaccgacatcacacgtgtccagttaatgtatcagtgatacgtgtattcacatttgttgcgcgtaggcgtacccaacaattttgatcgactatcagaaagtcaacggaagcgagtcgacctcgagggggggccccggccgaagcttcggccggggcccatcgataacgagtatcggtccccattgacacatctactcctaacgctaacaacattcttcacttctagtgtatggcatcgacaattggtactttaatcttgggtcttcacttttacaactaaacaacccaaatataaatattatttgagtgggtttggtgttcatcagaacattcccatctttggtaatgctacctagcataaaagtgagctatcacgttgggcagcccattccatgcaatttttaccttcctcaaaaaaaatctttgatatatttatggtataataatttaaacttcacattgatcataattttttcagcaaataagttccataatttggtgtttgcaatatcgaaattgttactcatagggtccagttgatttaatgacattagtgttgttaagttcacatgcttcaaagaattctacatgtctacaatgctgcatttgtctgtaaaatttgggttcttgtaaaaaatacatgtgttgaatatttaccaaaaaaatataatgcgatatgactttgtgtgagcatgtttggacacagttacaagtttacttctaaacttatattatgttttgcttcgtgcaagtacaagtgatttgaatatccaaggccaaagcatgtgtccatcactatatcaaatcaacataccatatatgtatatactcaacaaaaagcacaaataatcacatctatgttataaacacacccccacacaaccaaacattaacattcaataggttgtgctaggacatcattgggatgatgaagtaatattgtattatctatgtattgaccaagcatgagtttaaaattacgatttgatgttttcagttatttatatgatgaacatagttcagaaatatatcgagataaatctcaatcaatatattgattatttctaggaaacacatgccggtatgagggcaccattgtcgagtacatcttaagtgagttaacggatcctctagagtcgacctgcaggcatgcccgcggatatcgatgggccccggccgaagcttcaagtttgtacaaaaaagcaggctccggccagaatctcactgactagctaaacagcggccgcatcgagcagctggcttgtggggaccagacaaaaaaggaatggtgcagaattgttaggcgcacctaccaaaagcatctttgcctttattgcaaagataaagcagattcctctagtacaagtggggaacaaaataacgtggaaaagagctgtcctgacagcccactcactaatgcgtatgacgaacgcagtgacgaccacaaaactcgagcaacgagatcatgagccaatcaaagaggagtgatgtagacctaaagcaataatggagccatgacgtaagggcttacgcccatacgaaataattaaaggctgatgtgacctgtcggtctctcagaacctttactttttatgtttggcgtgtatttttaaatttccacggcaatgacgatgtgaccgtcgacccactaaaacattgctttgtcaaaagctaaaaaagatgatgcccgacagccacttgtgtgaagcatgagaagccggtccctccactaagaaaattagtgaagcatcttccagtggtccctccactcacagctcaatcagtgagcaacaggacgaaggaaatgacgtaagccatgacgtctaatcccagggcccggtgaccaatcgaattagcttggcgcgtggaccgaagcttgcatgcctgcagtgcagcgtgacccggtcgtgcccctctctagagataatgagcattgcatgtctaagttataaaaaattaccacatattttttttgtcacacttgtttgaagtgcagtttatctatctttatacatatatttaaactttactctacgaataatataatctatagtactacaataatatcagtgttttagagaatcatataaatgaacagttagacatggtctaaaggacaattgagtattttgacaacaggactctacagttttatctttttagtgtgcatgtgttctcctttttttttgcaaatagcttcacctatataatacttcatccattttattagtacatccatttagggtttagggttaatggtttttatagactaatttttttagtacatctattttattctattttagcctctaaattaagaaaactaaaactctattttagtttttttatttaataatttagatataaaatagaataaaataaagtgactaaaaattaaacaaataccctttaagaaattaaaaaaactaaggaaacatttttcttgtttcgagtagataatgccagcctgttaaacgccgtcgacgagtctaacggacaccaaccagcgaaccagcagcgtcgcgtcgggccaagcgaagcagacggcacggcatctctgtcgctgcctctggacccctctcgagagttccgctccaccgttggacttgctccgctgtcggcatccagaaattgcgtggcggagcggcagacgtgagccggcacggcaggcggcctcctcctcctctcacggcaccggcagctacgggggattcctttcccaccgctccttcgctttcccttcctcgcccgccgtaataaatagacaccccctccacaccctctttccccaacctcgtgttgttcggagcgcacacacacacaaccagatctcccccaaatccacccgtcggcacctccgcttcaaggtacgccgctcgtcctcccccccccccctctctaccttctctagatcggcgttccggtccatgcatggttagggcccggtagttctacttctgttcatgtttgtgttagatccgtgtttgtgttagatccgtgctgctagcgttcgtacacggatgcgacctgtacgtcagacacgttctgattgctaacttgccagtgtttctctttggggaatcctgggatggctctagccgttccgcagacgggatcgatttcatgattttttttgtttcgttgcatagggtttggtttgcccttttcctttatttcaatatatgccgtgcacttgtttgtcgggtcatcttttcatgcttttttttgtcttggttgtgatgatgtggtctggttgggcggtcgttctagatcggagtagaattctgtttcaaactacctggtggatttattaattttggatctgtatgtgtgtgccatacatattcatagttacgaattgaagatgatggatggaaatatcgatctaggataggtatacatgttgatgcgggttttactgatgcatatacagagatgctttttgttcgcttggttgtgatgatgtggtgtggttgggcggtcgttcattcgttctagatcggagtagaatactgtttcaaactacctggtgtatttattaattttggaactgtatgtgtgtgtcatacatcttcatagttacgagtttaagatggatggaaatatcgatctaggataggtatacatgttgatgtgggttttactgatgcatatacatgatggcatatgcagcatctattcatatgctctaaccttgagtacctatctattataataaacaagtatgttttataattattttgatcttgatatacttggatgatggcatatgcagcagctatatgtggatttttttagcactgccttcatacgctatttatttgcttggtactgtttcttttgtcgatgctcaccctgttgtttggtgttacttctgcaggtcgactttaacttagcctaggatccatggccactgtgaacaactggctcgctttctccctctccccgcaggagctgccgccctcccagacgacggactccacactcatctcggccgccaccgccgaccatgtctccggcgatgtctgcttcaacatcccccaagattggagcatgaggggatcagagctttcggcgctcgtcgcggagccgaagctggaggacttcctcggcggcatctccttctccgagcagcatcacaaggccaactgcaacatgatacccagcactagcagcacagtttgctacgcgagctcaggtgctagcaccggctaccatcaccagctgtaccaccagcccaccagctcagcgctccacttcgcggactccgtaatggtggcttcctcggccggtgtccacgacggcggtgccatgctcagcgcggccgccgctaacggtgtcgctggcgctgccagtgccaacggcggcggcatcgggctgtccatgattaagaactggctgcggagccaaccggcgcccatgcagccgagggtggcggcggctgagggcgcgcaggggctctctttgtccatgaacatggcggggacgacccaaggcgctgctggcatgccacttctcgctggagagcgcgcacgggcgcccgagagtgtatcgacgtcagcacagggtggagccgtcgtcgtcacggcgccgaaggaggatagcggtggcagcggtgttgccggcgctctagtagccgtgagcacggacacgggtggcagcggcggcgcgtcggctgacaacacggcaaggaagacggtggacacgttcgggcagcgcacgtcgatttaccgtggcgtgacaaggcatagatggactgggagatatgaggcacatctttgggataacagttgcagaagggaagggcaaactcgtaagggtcgtcaagtctatttaggtggctatgataaagaggagaaagctgctagggcttatgatcttgctgctctgaagtactggggtgccacaacaacaacaaattttccagtgagtaactacgaaaaggagctcgaggacatgaagcacatgacaaggcaggagtttgtagcgtctctgagaaggaagagcagtggtttctccagaggtgcatccatttacaggggagtgactaggcatcaccaacatggaagatggcaagcacggattggacgagttgcagggaacaaggatctttacttgggcaccttcagcacccaggaggaggcagcggaggcgtacgacatcgcggcgatcaagttccgcggcctcaacgccgtcaccaacttcgacatgagccgctacgacgtgaagagcatcctggacagcagcgccctccccatcggcagcgccgccaagcgcctcaaggaggccgaggccgcagcgtccgcgcagcaccaccacgccggcgtggtgagctacgacgtcggccgcatcgcctcgcagctcggcgacggcggagccctggcggcggcgtacggcgcgcactaccacggcgccgcctggccgaccatcgcgttccagccgggcgccgccagcacaggcctgtaccacccgtacgcgcagcagccaatgcgcggcggcgggtggtgcaagcaggagcaggaccacgcggtgatcgcggccgcgcacagcctgcaggacctccaccacctgaacctgggcgcggccggcgcgcacgactttttctcggcagggcagcaggccgccgccgctgcgatgcacggcctgggtagcatcgacagtgcgtcgctcgagcacagcaccggctccaactccgtcgtctacaacggcggggtcggcgacagcaacggcgccagcgccgtcggcggcagtggcggtggctacatgatgccgatgagcgctgccggagcaaccactacatcggcaatggtgagccacgagcaggtgcatgcacgggcctacgacgaagccaagcaggctgctcagatggggtacgagagctacctggtgaacgcggagaacaatggtggcggaaggatgtctgcatgggggactgtcgtgtctgcagccgcggcggcagcagcaagcagcaacgacaacatggccgccgacgtcgggcatggcggcgcgcagctcttcagtgtctggaacgacacttaagcgtacctagtggtacctgacatcttatagtctgcaacctctcgtgtctgaattcctatctttatcaagtgttattgcttccacgactataggacagctttcgtcgaaagcttttgctcatgtgatctcgaaggattcatctagtctgatttttcgtgacttgtatcggttttattggattcatccaacatatatcaataaaaaatgagttgtgtttcctttcttcctagttcagttaaaattatttccctcctgcgcttgtgctgtaattgtctgtgtacctgttgtttgtgactgtgttagttcccttggatatgatttcgtatttgatatgtacatggagatagcttagcttcattattggagtatgaagttagtatgacatagtcactctcctggaaaattgacactgcaaaccatatttttattctgaaccacaaatcctagtcagtccgctggcatatgccgtccgtttgctgaatccagaacgtgggtttggagatgtacggctgagatgcctctatgcgaaggggatttcgtggtgaaacgagatgggagtagagcaacgcccgtggaagatgcttcaaacttccacacttttgagcaacgatcggcagtagtaaggtagacgatttcaagatcaaagcatatgaagataaacaacatcaacaacaaaatttgttggggttctatagagagaaacagagctacatacatacactgttttgtatctaccatctgagatgatgaaaagatgaaaaactaaagaatgccccggcgccaacgccaggacacgccgcgcgcgcgtcacccgagccatctcttgacccagccggcgctgtatatttacacacgttgcagcatcgatcaccacctgttcgatcgcgtcgccgtcaccggcgcgccgcgacttattgaactagtctagggcgcggctaacaacctagcttagattgccttgtctaaacccttaggctaacgcgccactctagaaggccgatctcccccgaacgcgccagatccgatatcgatgggccctggccgaagcttggtcacccggtccgggcctagaaggccgatctcccgggcacccagctttcttgtacaaagtggccgttaacggatcggccagaatggcccggaccgggttaccccgcggttcaaagccaatgactgttgttaggtccagtttctaaggacgaatcatccaatcactggttctttctgaacaaaacaaagagctatagagttacgttactgtagccgagacagagcctgcaatctggttatgccacatactaggttctttcttaaagttgactcactctatcctaagttctacttacaaggagctacaacaaattggtcataaccggagagcgttcaaggaggtaatatcccatcttactctgtagcaaggctacaaaaggagagctaaagaactaggctacaaaaagagagctaaagaactaactatctagcaagactacagagctatagtgtagagatttcataaccggtgagcgttcaaggatactttgaagagaagaggtaatatctcaactagcaagactacaaaaaaatggagatataaaactaactgtctaacaagactacagagctatagtagagatagatacgttcgacacttaagcatgagaattcgagctcggtaccctggttcacaaactcaatacaacacacagtggagtagggtattacgctccggcggcccgaaccactctaaatccttgtgtcctcgtgtgctcttccaccattaatgactgtaattgcagggacacgaagagttgtagcgcttttgccaacaagatccgctatatgctagtagagtggaacctgcacagcaacaagcatccaataatctgagaataagaattatgtgtggtgatggttctcatctctgcaactcgccattttcgcgagagaaccaaatccaagttggtgaagatcatgatttgggctcatgggctggcatagtagctattacctttgcaattgtggttcgaatctatccgatattctccttttcagggagagctaatgcttatgcttattgggtattttggtttgacactgcttcacgcccaaaaaaaggcaactatgtctgagttggatatggcccaaaaaaaggcagctatgtctgagttggatatggaagtcttctttcgtttagggtgaagtaagaccaagctcatgagcttattatcttaggtcggaacaaattagttgataggcatggcacatttatcaaattataatgattttaacagaaaagcaacacctctttttcagcagcaccagctttgcaagctgcaattgacactccaagcatagtatttgctccaaactcagcctgcatttcgcacaatatcatatctatttccatttggataaaatatattttccagaaatatgggaacagaatcaagatacagaaaaaagttgtggtagtagtggtaagtggaaacacaagtacagtgaaaagatagcattatttctgaacagtcaaattaaccgaaataagtagtatcacatactgcccctaaattgactacacccaatgtaaagaattgcttgagcatattgagccatcagttgtttgtttgtgtaacggatttgacaatgcagagttcaggagcaaaaaaccgcaaaggagagaaagagggaaaggatctcctagtatcccaccttgtggcgcgccctgtcaagtgcatgatggcctggtcgatctgcgtctgctgctgcggttccatcccaacgagtgcctccgacaccttgtcgttgatcacccgcaccgcgtaggcgacccccctggcgaggaacttccgcctctcggaggccccggccgcgtcggcggcggcgccctcgagcgcgcccacgctagccgtagatgctcggtgcacggccttgttggtgtgcaactcgacctcaacggccggtgcgctacgcccgtcaaggatctggcgcgcccgcaccctcgtgatcacggtgggcgcctcccgcctcatgtggccgacgatgaaaagcgccgggttaggggccttggcgcgcaccgccgtattcagggcctcctcgctcttgcgcgagagcaggtgcttccccaggtactcctgcactgacaaggctgccacagcggtggaatttgtcctcacgacttcgccacgtcgtcctcacctccctggcttcccacgactccgccgtatcgaggtgctcggtgggtcgtcttaatccgaagtccgaactaggaagacgagacagagaggtctgaggaatgggcctcgtttgatgttgagctgaattatttttccagcataagcccaggtcttggtccatgaacaaaattactagaaacccagcccagtactacgatctaaaagagggactgccactggatagctctctctagcattctccacgctccaatacagcggcgtcgtgtctatccgggtctatccgcgaacacgtgagaactctccagaaactgctttctcctccacttcatctctctcgctttccctctataaaaagaccccttctaggaattgagggagacagcaagcaccaagcagcgatccgaagctcaatcaattcactcaaacctcttccccaaatcttcgattagatcttcgttgacaagaagactagaaccgaacctgacatgtccaacctgctcacggttcaccagaaccttccggctcttccagtggacgcgacgtccgatgaagtcaggaagaacctcatggacatgttccgcgacaggcaagcgttcagcgagcacacctggaagatgctgctctccgtctgccgctcctgggctgcatggtgcaagctgaacaacaggaagtggttccccgctgagcccgaggacgtgagggattaccttctgtacctgcaagcgcgaggtttgtttctgcttctacctttgatatatatataataattatcattaattagtagtaatataatatttcaaatatttttttcaaaataaaagaatgtagtatatagcaattgcttttctgtagtttataagtgtgtatattttaatttataacttttctaatatatgaccaaaacatggtgatgcctaggtctggcagtgaagaccatccagcaacaccttggacaactgaacatgcttcacaggcgctccggcctcccgcgccccagcgactcgaacgccgtgagcctcgtcatgcgccgcatcaggaaggaaaacgtcgatgccggcgaaagggcaaagcaggccctcgcgttcgagaggaccgatttcgaccaggtccgcagcctgatggagaacagcgacaggtgccaggacattaggaacctggcgttcctcggaattgcatacaacacgctcctcaggatcgcggaaattgcccgcattcgcgtgaaggacattagccgcaccgacggcggcaggatgcttatccacattggcaggaccaagacgctcgtttccaccgcaggcgtcgaaaaggccctcagcctcggagtgaccaagctcgtcgaacgctggatctccgtgtccggcgtcgcggacgacccaaacaactacctcttctgccgcgtccgcaagaacggggtggctgcccctagcgccaccagccaactcagcacgagggccttggaaggtattttcgaggccacccaccgcctgatctacggcgcgaaggatgacagcggtcaacgctacctcgcatggtccgggcactccgcccgcgttggagctgctagggacatggcccgcgccggtgtttccatccccgaaatcatgcaggcgggtggatggacgaacgtgaacattgtcatgaactacattcgcaaccttgacagcgagacgggcgcaatggttcgcctcctggaagatggtgactgaggtacccaacctagacttgtccatcttctggattggccaacttaattaatgtatgaaataaaaggatgcacacatagtgacatgctaatcactataatgtgggcatcaaagttgtgtgttatgtgtaattactagttatctgaataaaagagaaagagatcatccatatttcttatcctaaatgaatgtcacgtgtctttataattctttgatgaaccagatgcatttcattaaccaaatccatatacatataaatattaatcatatataattaatatcaattgggttagcaaaacaaatctagtctaggtgtgttttgcgatccgatatcgaattggccacggtaccagctgctgctgttctagggttcacaagtctgcctatttgtcttccccaatggagctatggttgtctggtctggtccttggtcgtgtcccgtttcattgtgtactatttacctgtaatgtgtatccttaagtctggtttgatggtgtctgaaacgttttgctgtggtagagcagcatggaagaactataatgaataagtgatccctaatcattgtgtccaaattttgcttctgctatacccttttgtgctgtttcttatgttttgcttaaaaatttgatctgacaaacaaatttgtctaaattatgctcttgttctgactgtgtactgtacacatttgtattgctaccggtttggcacatagttttctctttgattgcagatcaaacccttctgattgcagattgcttggctatggctgatgtgctcactgttcttctttagcttgtatattgctgatggtggcttggctacggctgaaaaagttgctgctgcgccgacttggcaactgttgctccagtaatgctttgtcctctcttcctagccgccgacttggcacttggcagctgttgctcctgtaatgcgttgttatctcttatctcttgagatgtactatgattttgaggctgtttgacttgtgccagattgccagtgctgatgctatattatctcaggtttttatgctagtatatgttttactgtgtgctgcctgtgtcgagttacgtaatctattgaaccgctatgcgtgttgatgccctgttgttgcttgccagattgatgcccctgttgcttgcagcttgcaagctgtagtgaaatcctaaaattccaaaccaaatctattctgaacttttgaagatctgtgatgtccggaagaaaagattcaaacagataaacgggactctccagaatctataaaataaatgatcgacaaacgctttgctttggtaggcttcaagcttggtcacccggtccgggcctagaaggccagcttcggccgccccgggcaactttattatacaaagttgatagataaatcagatatctggttcctaaggacccggcggaccgattaaactgattcggtccgacgcgttacctaataacttcgtatagcatacattatacgaagttattagctaactaactagtaagcgtacacctgagcggttaccgaattcctgcccttaaggccaattgttcaagattcattcaacaattgaaacatctcccatgattaaatcagtataaggttgctatggtcttgcttgacaaagtttttttttgagggaatttcaactaaatttttgagtgaaactatcaaatactgattttaaaaaatttttataaaaggaagcgcagagataaaaggccatctatgctacaaaagtacccaaaaatgtaatcctaaagtatgaattgcattttttttttgtttggacgaaaggaaaggagtattaccacaagaatgatatcatcttcatatttagatcttttttgggtaaagcttgagattctctaaatatagagaaatcagaagaaaaaaaaaccgtgttttggtggttttgatttctagcctccacaataactttgacggcgtcgacaagtctaacggacaccaagcagcgaaccaccagcgccgagccaagcgaagcagacggccgagacgttgacaccttcggcgcggcatctctcgagagttccgctccggcgctccacctccaccgctggcggtttcttattccgttccgttccgcctcctgctctgctcctctccacaccacacggcacgaaaccgttacggcaccggcagcacccagcacgggagaggggattcctttcccaccgttccttccctttccgccccgccgctataaatagccagccccatccccagcttttttccccaatctcatctcctctctcctgttgttcggagcacacgcacaatccgatcgatccccaaatccccttcgtctctcctcgcgagcctcgtggatcccagcttcaaggtacggcgatcgatcatcccccctccttctctctaccttcttttctctagactacatcggatggcgatccatggttagggcctgctagtttcccttcctgttttgtcgatggctgcgaggcacaatagatctgatggcgttatgacggctaacttgtcatgttgttgcgatttatagtccctttaggagatcagtttaatttctcggatggttcgagatcggtggtccatggttagtaccctaagatccgcgctgttagggttcgtagatggaggcgacctgttctgattgttaacttgtcagtacctgggaaatcctgggatggttctagctcgtccgcagatgagatcgatttcatgatcctctgtatcttgtttcgttgcctaggttccgtctaatctatccgtggtatgatgtagatgttttgatcgtgctaactacgtcttgtaaagttaattgtcaggtcataatttttagcatgcctttttttttgtttggttttgtctaattgggctgtcgttctagatcagagtagaagactgttccaaactacctgctggatttattgaacttggatctgtatgtgtgtcacatatcttcataaattcatgattaagatggattgaaatatcttttatctttttggtatggatagttctatatgttggtgtggctttgttagatgtatacatgcttagatacatgaagcaacgtgctgctactgtttagtaattgctgttcatttgtctaataaacagataaggatatgtatttatgttgctgttggttttgctggtactttgttggatacaaatgcttcaatacagaaaacagcatgctgctacgatttaccatttatctaatcttatcatatgtctaatctaataaacaaacatgcttttaaattatcttcatatgcttggatgatggcatacacagcggctatgtgtggttttttaaatacccagcatcatgggcatgcatgacactgctttaatatgctttttatttgcttgagactgtttcttttgtttatactgaccctttagttcggtgactcttctgcaggtcgactttaacttagcctaggatccatggcccagtccaagcacggcctgaccaaggagatgaccatgaagtaccgcatggagggctgcgtggacggccacaagttcgtgatcaccggcgagggcatcggctaccccttcaagggcaagcaggccatcaacctgtgcgtggtggagggcggccccttgcccttcgccgaggacatcttgtccgccgccttcatgtacggcaaccgcgtgttcaccgagtacccccaggacatcgtcgactacttcaagaactcctgccccgccggctacacctgggaccgctccttcctgttcgaggacggcgccgtgtgcatctgcaacgccgacatcaccgtgagcgtggaggagaactgcatgtaccacgagtccaagttctacggcgtgaacttccccgccgacggccccgtgatgaagaagatgaccgacaactgggagccctcctgcgagaagatcatccccgtgcccaagcagggcatcttgaagggcgacgtgagcatgtacctgctgctgaaggacggtggccgcttgcgctgccagttcgacaccgtgtacaaggccaagtccgtgccccgcaagatgcccgactggcacttcatccagcacaagctgacccgcgaggaccgcagcgacgccaagaaccagaagtggcacctgaccgagcacgccatcgcctccggctccgccttgccctccggactcagatctcgatagggtaccaatggccagttaacagatccagctgctgctgttctagggttcacaagtctgcctatttgtcttccccaatggagctatggttgtctggtctggtccttggtcgtgtcccgtttcattgtgtactatttacctgtaatgtgtatccttaagtctggtttgatggtgtctgaaacgttttgctgtggtagagcagcatggaagaactataatgaataagtgatccctaatcattgtgtccaaattttgcttctgctatacccttttgtgctgtttcttatgttttgcttaaaaatttgatctgacaaacaaatttgtctaaattatgctcttgttctgactgtgtactgtacacatttgtattgctaccggtttggcacatagttttctctttgattgcagatcaaacccttctgattgcagattgcttggctatggctgatgtgctcactgttcttctttagcttgtatattgctgatggtggcttggctacggctgaaaaagttgctgctgcgccgacttggcaactgttgctccagtaatgctttgtcctctcttcctagccgccgacttggcacttggcagctgttgctcctgtaatgcgttgttatctcttatctcttgagatgtactatgattttgaggctgtttgacttgtgccagattgccagtgctgatgctatattatctcaggtttttatgctagtatatgttttactgtgtgctgcctgtgtcgagttacgtaatctattgaaccgctatgcgtgttgatgccctgttgttgcttgccagattgatgcccctgttgcttgcagcttgcaagctgtagtgaaatcctaaaattcgaaaccaaatctattctgaacttttgaagatctgtgatgtccggaagaaaagattcaaacagataaacgggactctccagaatctataaaataaatgatcgacaaacgctttgctttggtaggcttcctagttagttagcggaccgaagcttcggtccgggcctgcggccgcagatatcagaacctgcgtctggacgcacaagtcatagcattatcggctaaaatttcttaatttctaaattagtcatatcggctaagaaagtggggagcactatcatttcgtagaacaagaacaaggtatcatatatatatatatatataatatttaaactttgttaagtggaatcaaagtgctagtattaatggagtttcatgtgcattaaattttatgtcacatcagcaattttgttgacttggcaaggtcatttagggtgtgtttggaagacaggggctattaggagtattaaacatagtctaattacaaaactaattgcacaaccgctaagctgaatcgcgagatggatctattaagcttaattagtccatgatttgacaatgtggtgctacaataaccatttgctaatgatggattacttaggtttaatagattcgtctcgtgatttagcctatgggttctgctattaattttgtaattagctcatatttagttcttataattagtatccgaacatccaatgtgacatgctaaagtttaaccctggtatccaaatgaagtcttatgagagtttcatcactccggtggtatatgtacttaggctccgttttcttccaccgacttatttttagcacccgtcacattgaatgtttagatactaattagaagtattaaacgtagactatttacaaaatccattacataagacgaatctaaacggcgagacgaatctattaaacctaattagtccatgatttgacaatgtgttgctacagtaaacatttgctaatgatggattaattaggcttaatagattcgtctcgccgtttagcctccacttatgtaatgggttttctaaacaatctacgtttaatactcctaattagtatctaaatattcaatgtgacacgtgctaaaaataagtcagtggaaggaagagaacgtccccttagttttccatcttattaattgtacgatgaaactgtgcagccagatgattgacaatcgcaatacttcaactagtgggccatgcacatcagcgacgtgtaacgtcgtgagttgctgttcccgtagagaaatatcaactggtgggccacgcacatcagcgtcgtgtaacgtggacggaggagccccgtgacggcgtcgacatcgaacggccaccaaccacggaaccacccgtccccacctctcggaagctccgctccacggcgtcgacatctaacggctaccagcaggcgtacgggttggagtggactccttgcctctttgcgctggcggcttccggaaattgcgtggcggagacgaggcgggctcgtctcacacggcacggaagacgtcacgggttccttccccacctctcctcttccccaccgccataaatagccgaccccctcgcctttctccccaatctcatctcgtctcgtgttgttcggagcacaccacccgccccaaatcgttcttcccgcaagcctcggcgatccttcacccgcttcaaggtacggcgatcgtcttcctcctctagatcggcgtgatctgcaagtagttgatttggtagatggttaggatctgtgcactgaagaaatcatgttagatccgcgatgtttctgttcgtagatggctgggaggtggaatttttgtgtagatctgatatgttctcctgtttatcttgtcacgctcctgcgatttgtggggattttaggtcgttgatctgggaatcgtggggttgcttctaggctgttcgtagatgaggtcgttctcacggtttactggatcattgcctagtagatcagctcgggctttcgtctttgtatatggtgcccatacttgcatctatgatctggttccgtggtgttacctaggtttctgcgcctgattcgtccgatcgattttgttagcatgtggtaaacgtttggtcatggtctgatttagattagagtcgaataggatgatctcgatctagctcttgggattaatatgcatgtgtcaccaatctgttccgtggttaagatgatgaatctatgcttagttaatgggtgtagatatatatgctgctgttcctcaatgatgccgtagcttttacctgagcagcatggatcgtcctgttacttaggtagatgcacatgcttatagatcaagatatgtactgctactgttggaattctttagtatacctgatgatcatccatgctcttgttacttgttttggtatacttggatgatggcatgctgctgctttttgttgatttgagcccatccatatctgcatatgtcacatgattaagatgattacgctgtttctgtatgatgccatagcttttatgtgagcaacatgcatcctcctggttatatgcattaatagatggaagatatctattgctacaatttgatgattattttgtacatacgatgatcaagcatgctcttcatactttgttgatatacttggataatgaaatgctgctgcacgttcattctatagcactaatgatgtgatgaacacgcacgacctgtttgtggcatctgtttgaatgtgttgttgctgttcactagagactgttttattaacctactgctagatacttacccttctgtctgtttattcttttgcagccagaatagcggatccgcccatggtcgaacaggacggcctgcatgcaggatcaccagcggcctgggtcgaaagactcttcggctacgactgggcacaacagaccatcgggtgtagcgacgcagctgttttcaggctgtccgcacagggcagacccgttttgttcgtcaaaacagacctgtctggcgcgctcaacgaactgcaagacgaggccgcaagactgagctggcttgctaccacaggcgttccttgtgctgcagtcctcgacgtcgttactgaggctggaagagactggctgctcctgggtgaagtcccaggacaggaccttttgtccagccatctggcacctgccgaaaaggtcagcatcatggcagacgccatgagaaggctgcacacactcgaccctgcaacatgccccttcgatcaccaggcaaaacacaggatcgagcgcgcaagaacgcgcatggaggctggtttggtcgaccaagatgacctcgacgaggaacaccaaggactggctcctgctgaactcttcgccagactcaaggcgagaatgccagacggtgacgacctggtcgtcacacacggcgacgcttgtctcccaaacataatggtcgagaacggacgcttcagcggtttcatcgactgcggtagactcggagtcgctgacagataccaggacatcgccctggcaacacgcgacatcgcagaggaactcggaggcgaatgggctgacaggtttctcgtgctctacggtatcgctgctccagacagccagaggatcgcattctacaggctcctcgacgagttcttttagttcgaacggtacccggggatcctctagtgccgtgggtcgtttaagctgccgctgtacctgtgtcgtctggtgccttctggtgtacctgggaggttgtcgtctatcaagtatctgtggttggtgtcatgagtcagtgagtcccaatactgttcgtgtcctgtgtgcattatacccaaaactgttatgggcaaatcatgaataagcttgatgttcgaacttaaaagtctctgctcaatatggtattatggttgtttttgttcgtctcctaatatttgcctgggatcaaattttattggctggtgttcatttgacctccatgttcttgctaggctccattttttactctacagccataatatgtttgattgtttggtttgttctttgttgtacacctggttctgtcgagcttagttttcgacactggcttacagcttaacatgttgctattttattgggttctgattgctattttattgggttctgattgctagtttttgctgaatccaaaaaccatgttatttatttaagcgatccaggttattattatgatggtggctaagtttttttttttccaagggtaaattttctggattctccagtgtttctgtggccgaattcaatcactagagtcgacctgcatgattccgatgacttcgtaggttcctagctcaagccgctcgtgtccaagcgtcacttacgattagctaatgattacggcatctaggaccgactagctagctagctaagagctcggtaccgagctcgaattcattccgattaatcgtggcctcttgctcttcaggatgaagagctatgtttaaacgtgcaagcgctactagacaattcagtacattaaaaacgtccgcaatgtgttattaagttgtctaagcgtcaatttgtttacaccacaatatatcctgcca

SEQ ID NO: 168 - DNA, 25830 bp, synthetic construct
  source 1..25830: mol_type = other DNA
gtttacccgccaatatatcctgtcaaacactgcggccgcacttgaccgcggatggagccggagctgtggtgaggccatcgacgggaggtgggggagaacacagtctcagtgttctttgtgagtccgcaaggtttttagcttttctgtattaattaaggttgctgttggctgtagaatacggtcgtggaagagctgtatcggtagctactacgtaagctattatatactggaagtctggagctcgtcgatctccggtcgtcttcctccatttctcctcgtcttgctttgactgctgctaccatttgcttctgttttctgatgaagcatgccatgtcggccaccagtgtttgtgtggtttttgcagggaatggctttcaagtgctgtgattgaatggccctcgtcgtcctcggctgagctcacatggacgcgtcatgtgagtgagatatatgatcatatgatgagtggggttcgggtgagtgcgtacttgaagtaggatcccgctttcactcattcattcattggcctttaaaccgggaaattttcgcgaggagatggagggaagcaagcagggtgacgagtgcagagtgccgcgagcgctttgtcaaaaggcaccgccgtaggcaaaaaaatcaatggccctgactgactcgatggtagtactactgtagagactagagagggttgctccccatatcttcgtgtgacttttactccagcattgcatttccgtcattgagacgttaattaatagcagctttcgggacagatgactgtggccatgtttcgtcacggccgcttcgtgccagctgggggtactatagtactgtgattttgttagtaaaaactttcattaggccaccattgacgaccgggccttcgcttttgctgcgctaattaaccatttcccggcgaccgaagggaacatgaacatgccccgacacatgagggcatgaggactagtgttctccctgtcgttcgttgacttgactagtgatagtttaaacgctcttcaactggaagagcggttactaccggttcactagctagctgctaatcgagctagttaccctatgaggtgacatgaagcgctcacggttactatgacggttagcttcacgactgttggtggcagtagcgtacgacttagctatagttccggacttacccttaagataacttcgtatagcatacattatacgaagttatgggcccacgcgtgaagagcggttaccagagctggtcacctttgtccaccaagatggaactgtcttcggccagaatggccatctggattcagcaggcctagaaggccatttatcgctatcaactttgtatagaaaagttgggccgaattcgagctcggtacggccagaatggcccggaccgaagcttgcatgcctgcagcccgtgcagcgtgacccggtcgtgcccctctctagagataatgagcattgcatgtctaagttataaaaaattaccacatattttttttgtcacacttgtttgaagtgcagtttatctatctttatacatatatttaaactttactctacgaataatataatctatagtactacaataatatcagtgttttagagaatcatataaatgaacagttagacatggtctaaaggacaattgagtattttgacaacaggactctacagttttatctttttagtgtgcatgtgttctcctttttttttgcaaatagcttcacctatataatacttcatccattttattagtacatccatttagggtttagggttaatggtttttatagactaatttttttagtacatctattttattctattttagcctctaaattaagaaaactaaaactctattttagtttttttatttaataatttagatataaaatagaataaaataaagtgactaaaaattaaacaaataccctttaagaaattaaaaaaactaaggaaacatttttcttgtttcgagtagataatgccagcctgttaaacgccgtcgacgagtctaacggacaccaaccagcgaaccagcagcgtcgcgtcgggccaagcgaagcagacggcacggcatctctgtcgctgcctctggacccctctcgagagttccgctccaccgttggacttgctccgctgtcggcatccagaaattgcgtggcggagcggcagacgtgagccggcacggcaggcggcctcctcctcctctcacggcaccggcagctacgggggattcctttcccaccgctccttcgctttcccttcctcgcccgccgtaataaatagacaccccctccacaccctctttccccaacctcgtgttgttcggagcgcacacacacacaaccagatctcccccaaatccacccgtcggcacctccgcttcaaggtacgccgctcgtcctcccccccccccctctctaccttctctagatcggcgttccggtccatgcatggttagggcccggtagttctacttctgttcatgtttgtgttagatccgtgtttgtgttagatccgtgctgctagcgttcgtacacggatgcgacctgtacgtcagacacgttctgattgctaacttgccagtgtttctctttggggaatcctgggatggctctagccgttccgcagacgggatcgatttcatgattttttttgtttcgttgcatagggtttggtttgcccttttcctttatttcaatatatgccgtgcacttgtttgtcgggtcatcttttcatgcttttttttgtcttggttgtgatgatgtggtctggttgggcggtcgttctagatcggagtagaattctgtttcaaactacctggtggatttattaattttggatctgtatgtgtgtgccatacatattcatagttacgaattgaagatgatggatggaaatatcgatctaggataggtatacatgttgatgcgggttttactgatgcatatacagagatgctttttgttcgcttggttgtgatgatgtggtgtggttgggcggtcgttcattcgttctagatcggagtagaatactgtttcaaactacctggtgtatttattaattttggaactgtatgtgtgtgtcatacatcttcatagttacgagtttaagatggatggaaatatcgatctaggataggtatacatgttgatgtgggttttactgatgcatatacatgatggcatatgcagcatctattcatatgctctaaccttgagtacctatctattataataaacaagtatgttttataattattttgatcttgatatacttggatgatggcatatgcagcagctatatgtggatttttttagcactgccttcatacgctatttatttgcttggtactgtttcttttgtcgatgctcaccctgttgtttggtgttacttctgcaggtagaaggatccgcccatggcggccaatgcgggcggcggtggagcgggaggaggcagcggcagcggcagcgtggctgcgccggcggtgtgccgccccagcggctcgcggtggacgccgacgccggagcagatcaggatgctgaaggagctctactacggctgcggcatccggtcgcccagctcggagcagatccagcgcatcaccgccatgctgcggcagcacggcaagatcgagggcaagaacgtcttctactggttccagaaccacaaggcccgcgagcgccagaagcgccgcctcaccagcctcgacgtcaacgtgcccgccgccggcgcggccgacgccaccaccagccaactcggcgtcctctcgctgtcgtcgccgccgccttcaggcgcggcgcctccctcgcccaccctcggcttctacgccgccggcaatggcggcggatcggctgtgctgctggacacgagttccgactggggcagcagcggcgctgctatggccaccgagacatgcttcctgcaggactacatgggcgtgacggacacgggcagctcgtcgcagtggccacgcttctcgtcgtcggacacgataatggcggcggccgcggcgcgggcggcgacgacgcgggcgcccgagacgctccctctcttcccgacctgcggcgacgacggcggcagcggtagcagcagctacttgccgttctggggtgccgcgtccacaactgccggcgccacttcttccgttgcgatccaacagcaacaccagctgcaggagcagtacagcttttacagcaacagcaacagcacccagctggccggcaccggcaaccaagacgtatcggcaacagcagcagcagccgccgccctggagctgagcctcagctcatggtgctccccttaccctgctgcagggagtatgtgagagcaacgcgagctgccactgctcttcactgatgtctctggaatggaaggaggaggaagtgagaacagatcattcgacaaagcagcattagtccgttgatcggtggaagaccactcgtcagtgttgagttgaatgtttgatcaataaaatacggcaatgctgtaagggttgttttttatgccattgataatacactgtactgttcagttgttgaactctatttcttagccatgccaagtgcttttcttattttgaataacattacagcaaaaagttgaaagacaaaaaaaaaaacccccgaacagagtgctttgggtcccaagcttctttagactgtgttcggcgttccccctaaatttctccccctatatctcactcacttgtcacatcagcgttctctttccccctatatctccacgctctacagcagttccacctatatcaaacctctataccccaccacaacaatattatatactttcatcttcaactaactcatgtaccttccaatttttttctactaataattatttacgtgcacagaaacttagcaaggagagagagagcgggaatttaaatgctcggcgttaggcttttagtccgctaggtggctagaccgaggttaggacgctagttcactaggggcctagtggtgttttaagacgtcacggtcacctgaagaaactatgtgctgtagtatagccgctgcccgctggctagctagctagttgagtcatttagcggcgatgattgagtaataatgtgtcacgcatcaccatgcatgggtggcagtgtcagtgtgagcaatgacctgaatgaacaattgaaatgaaaagaaaaaagtattgttccaaattaaacgttttaaccttttaataggtttatacaataattgatatatgttttctgtatatgtctaatttgttatcatccatttagatatagacaaaaaaaatctaagaactaaaacaaatgctaatttgaaatgaagggagtatatattgggataatgtcgatgagatccctcgtaatatcaccgacatcacacgtgtccagttaatgtatcagtgatacgtgtattcacatttgttgcgcgtaggcgtacccaacaattttgatcgactatcagaaagtcaacggaagcgagtcgacctcgagggggggccccggccgaagcttcggccggggcccatcgataacgagtatcggtccccattgacacatctactcctaacgctaacaacattcttcacttctagtgtatggcatcgacaattggtactttaatcttgggtcttcacttttacaactaaacaacccaaatataaatattatttgagtgggtttggtgttcatcagaacattcccatctttggtaatgctacctagcataaaagtgagctatcacgttgggcagcccattccatgcaatttttaccttcctcaaaaaaaatctttgatatatttatggtataataatttaaacttcacattgatcataattttttcagcaaataagttccataatttggtgtttgcaatatcgaaattgttactcatagggtccagttgatttaatgacattagtgttgttaagttcacatgcttcaaagaattctacatgtctacaatgctgcatttgtctgtaaaatttgggttcttgtaaaaaatacatgtgttgaatatttaccaaaaaaatataatgcgatatgactttgtgtgagcatgtttggacacagttacaagtttacttctaaacttatattatgttttgcttcgtgcaagtacaagtgatttgaatatccaaggccaaagcatgtgtccatcactatatcaaatcaacataccatatatgtatatactcaacaaaaagcacaaataatcacatctatgttataaacacacccccacacaaccaaacattaacattcaataggttgtgctaggacatcattgggatgatgaagtaatattgtattatctatgtattgaccaagcatgagtttaaaattacgatttgatgttttcagttatttatatgatgaacatagttcagaaatatatcgagataaatctcaatcaatatattgattatttctaggaaacacatgccggtatgagggcaccattgtcgagtacatcttaagtgagttaacggatcctctagagtcgacctgcaggcatgcccgcggatatcgatgggccccggccgaagcttcaagtttgtacaaaaaagcaggctccggccagaatctcactgactagctaaacagcggccgcatcgagcagctggcttgtggggaccagacaaaaaaggaatggtgcagaattgttaggcgcacctaccaaaagcatctttgcctttattgcaaagataaagcagattcctctagtacaagtggggaacaaaataacgtggaaaagagctgtcctgacagcccactcactaatgcgtatgacgaacgcagtgacgaccacaaaactcgagcaacgagatcatgagccaatcaaagaggagtgatgtagacctaaagcaataatggagccatgacgtaagggcttacgcccatacgaaataattaaaggctgatgtgacctgtcggtctctcagaacctttactttttatgtttggcgtgtatttttaaatttccacggcaatgacgatgtgaccgtcgacccactaaaacattgctttgtcaaaagctaaaaaagatgatgcccgacagccacttgtgtgaagcatgagaagccggtccctccactaagaaaattagtgaagcatcttccagtggtccctccactcacagctcaatcagtgagcaacaggacgaaggaaatgacgtaagccatgacgtctaatcccagggcccggtgaccaatcgaattagcttggcgcgtggaccgaagcttgcatgcctgcagtgcagcgtgacccggtcgtgcccctctctagagataatgagcattgcatgtctaagttataaaaaattaccacatattttttttgtcacacttgtttgaagtgcagtttatctatctttatacatatatttaaactttactctacgaataatataatctatagtactacaataatatcagtgttttagagaatcatataaatgaacagttagacatggtctaaaggacaattgagtattttgacaacaggactctacagttttatctttttagtgtgcatgtgttctcctttttttttgcaaatagcttcacctatataatacttcatccattttattagtacatccatttagggtttagggttaatggtttttatagactaatttttttagtacatctattttattctattttagcctctaaattaagaaaactaaaactctattttagtttttttatttaataatttagatataaaatagaataaaataaagtgactaaaaattaaacaaataccctttaagaaattaaaaaaactaaggaaacatttttcttgtttcgagtagataatgccagcctgttaaacgccgtcgacgagtctaacggacaccaaccagcgaaccagcagcgtcgcgtcgggccaagcgaagcagacggcacggcatctctgtcgctgcctctggacccctctcgagagttccgctccaccgttggacttgctccgctgtcggcatccagaaattgcgtggcggagcggcagacgtgagccggcacggcaggcggcctcctcctcctctcacggcaccggcagctacgggggattcctttcccaccgctccttcgctttcccttcctcgcccgccgtaataaatagacaccccctccacaccctctttccccaacctcgtgttgttcggagcgcacacacacacaaccagatctcccccaaatccacccgtcggcacctccgcttcaaggtacgccgctcgtcctcccccccccccctctctaccttctctagatcggcgttccggtccatgcatggttagggcccggtagttctacttctgttcatgtttgtgttagatccgtgtttgtgttagatccgtgctgctagcgttcgtacacggatgcgacctgtacgtcagacacgttctgattgctaacttgccagtgtttctctttggggaatcctgggatggctctagccgttccgcagacgggatcgatttcatgattttttttgtttcgttgcatagggtttggtttgcccttttcctttatttcaatatatgccgtgcacttgtttgtcgggtcatcttttcatgcttttttttgtcttggttgtgatgatgtggtctggttgggcggtcgttctagatcggagtagaattctgtttcaaactacctggtggatttattaattttggatctgtatgtgtgtgccatacatattcatagttacgaattgaagatgatggatggaaatatcgatctaggataggtatacatgttgatgcgggttttactgatgcatatacagagatgctttttgttcgcttggttgtgatgatgtggtgtggttgggcggtcgttcattcgttctagatcggagtagaatactgtttcaaactacctggtgtatttattaattttggaactgtatgtgtgtgtcatacatcttcatagttacgagtttaagatggatggaaatatcgatctaggataggtatacatgttgatgtgggttttactgatgcatatacatgatggcatatgcagcatctattcatatgctctaaccttgagtacctatctattataataaacaagtatgttttataattattttgatcttgatatacttggatgatggcatatgcagcagctatatgtggatttttttagcactgccttcatacgctatttatttgcttggtactgtttcttttgtcgatgctcaccctgttgtttggtgttacttctgcaggtcgactttaacttagcctaggatccatggccactgtgaacaactggctcgctttctccctctccccgcaggagctgccgccctcccagacgacggactccacactcatctcggccgccaccgccgaccatgtctccggcgatgtctgcttcaacatcccccaagattggagcatgaggggatcagagctttcggcgctcgtcgcggagccgaagctggaggacttcctcggcggcatctccttctccgagcagcatcacaaggccaactgcaacatgatacccagcactagcagcacagtttgctacgcgagctcaggtgctagcaccggctaccatcaccagctgtaccaccagcccaccagctcagcgctccacttcgcggactccgtaatggtggcttcctcggccggtgtccacgacggcggtgccatgctcagcgcggccgccgctaacggtgtcgctggcgctgccagtgccaacggcggcggcatcgggctgtccatgattaagaactggctgcggagccaaccggcgcccatgcagccgagggtggcggcggctgagggcgcgcaggggctctctttgtccatgaacatggcggggacgacccaaggcgctgctggcatgccacttctcgctggagagcgcgcacgggcgcccgagagtgtatcgacgtcagcacagggtggagccgtcgtcgtcacggcgccgaaggaggatagcggtggcagcggtgttgccggcgctctagtagccgtgagcacggacacgggtggcagcggcggcgcgtcggctgacaacacggcaaggaagacggtggacacgttcgggcagcgcacgtcgatttaccgtggcgtgacaaggcatagatggactgggagatatgaggcacatctttgggataacagttgcagaagggaagggcaaactcgtaagggtcgtcaagtctatttaggtggctatgataaagaggagaaagctgctagggcttatgatcttgctgctctgaagtactggggtgccacaacaacaacaaattttccagtgagtaactacgaaaaggagctcgaggacatgaagcacatgacaaggcaggagtttgtagcgtctctgagaaggaagagcagtggtttctccagaggtgcatccatttacaggggagtgactaggcatcaccaacatggaagatggcaagcacggattggacgagttgcagggaacaaggatctttacttgggcaccttcagcacccaggaggaggcagcggaggcgtacgacatcgcggcgatcaagttccgcggcctcaacgccgtcaccaacttcgacatgagccgctacgacgtgaagagcatcctggacagcagcgccctccccatcggcagcgccgccaagcgcctcaaggaggccgaggccgcagcgtccgcgcagcaccaccacgccggcgtggtgagctacgacgtcggccgcatcgcctcgcagctcggcgacggcggagccctggcggcggcgtacggcgcgcactaccacggcgccgcctggccgaccatcgcgttccagccgggcgccgccagcacaggcctgtaccacccgtacgcgcagcagccaatgcgcggcggcgggtggtgcaagcaggagcaggaccacgcggtgatcgcggccgcgcacagcctgcaggacctccaccacctgaacctgggcgcggccggcgcgcacgactttttctcggcagggcagcaggccgccgccgctgcgatgcacggcctgggtagcatcgacagtgcgtcgctcgagcacagcaccggctccaactccgtcgtctacaacggcggggtcggcgacagcaacggcgccagcgccgtcggcggcagtggcggtggctacatgatgccgatgagcgctgccggagcaaccactacatcggcaatggtgagccacgagcaggtgcatgcacgggcctacgacgaagccaagcaggctgctcagatggggtacgagagctacctggtgaacgcggagaacaatggtggcggaaggatgtctgcatgggggactgtcgtgtctgcagccgcggcggcagcagcaagcagcaacgacaacatggccgccgacgtcgggcatggcggcgcgcagctcttcagtgtctggaacgacacttaagcgtacctagtggtacctgacatcttatagtctgcaacctctcgtgtctgaattcctatctttatcaagtgttattgcttccacgactataggacagctttcgtcgaaagcttttgctcatgtgatctcgaaggattcatctagtctgatttttcgtgacttgtatcggttttattggattcatccaacatatatcaataaaaaatgagttgtgtttcctttcttcctagttcagttaaaattatttccctcctgcgcttgtgctgtaattgtctgtgtacctgttgtttgtgactgtgttagttcccttggatatgatttcgtatttgatatgtacatggagatagcttagcttcattattggagtatgaagttagtatgacatagtcactctcctggaaaattgacactgcaaaccatatttttattctgaaccacaaatcctagtcagtccgctggcatatgccgtccgtttgctgaatccagaacgtgggtttggagatgtacggctgagatgcctctatgcgaaggggatttcgtggtgaaacgagatgggagtagagcaacgcccgtggaagatgcttcaaacttccacacttttgagcaacgatcggcagtagtaaggtagacgatttcaagatcaaagcatatgaagataaacaacatcaacaacaaaatttgttggggttctatagagagaaacagagctacatacatacactgttttgtatctaccatctgagatgatgaaaagatgaaaaactaaagaatgccccggcgccaacgccaggacacgccgcgcgcgcgtcacccgagccatctcttgacccagccggcgctgtatatttacacacgttgcagcatcgatcaccacctgttcgatcgcgtcgccgtcaccggcgcgccgcgacttattgaactagtctagggcgcggctaacaacctagcttagattgccttgtctaaacccttaggctaacgcgccactctagaaggccgatctcccccgaacgcgccagatccgatatcgatgggccctggccgaagcttggtcacccggtccgggcctagaaggccgatctcccgggcacccagctttcttgtacaaagtggccgttaacggatcggccagaatggcccggaccgggttaccccgcggttcaaagccaatgactgttgttaggtccagtttctaaggacgaatcatccaatcactggttctttctgaacaaaacaaagagctatagagttacgttactgtagccgagacagagcctgcaatctggttatgccacatactaggttctttcttaaagttgactcactctatcctaagttctacttacaaggagctacaacaaattggtcataaccggagagcgttcaaggaggtaatatcccatcttactctgtagcaaggctacaaaaggagagctaaagaactaggctacaaaaagagagctaaagaactaactatctagcaagactacagagctatagtgtagagatttcataaccggtgagcgttcaaggatactttgaagagaagaggtaatatctcaactagcaagactacaaaaaaatggagatataaaactaactgtctaacaagactacagagctatagtagagatagatacgttcgacacttaagcatgagaattcgagctcggtaccctggttcacaaactcaatacaacacacagtggagtagggtattacgctccggcggcccgaaccactctaaatccttgtgtcctcgtgtgctcttccaccattaatgactgtaattgcagggacacgaagagttgtagcgcttttgccaacaagatccgctatatgctagtagagtggaacctgcacagcaacaagcatccaataatctgagaataagaattatgtgtggtgatggttctcatctctgcaactcgccattttcgcgagagaaccaaatccaagttggtgaagatcatgatttgggctcatgggctggcatagtagctattacctttgcaattgtggttcgaatctatccgatattctccttttcagggagagctaatgcttatgcttattgggtattttggtttgacactgcttcacgcccaaaaaaaggcaactatgtctgagttggatatggcccaaaaaaaggcagctatgtctgagttggatatggaagtcttctttcgtttagggtgaagtaagaccaagctcatgagcttattatcttaggtcggaacaaattagttgataggcatggcacatttatcaaattataatgattttaacagaaaagcaacacctctttttcagcagcaccagctttgcaagctgcaattgacactccaagcatagtatttgctccaaactcagcctgcatttcgcacaatatcatatctatttccatttggataaaatatattttccagaaatatgggaacagaatcaagatacagaaaaaagttgtggtagtagtggtaagtggaaacacaagtacagtgaaaagatagcattatttctgaacagtcaaattaaccgaaataagtagtatcacatactgcccctaaattgactacacccaatgtaaagaattgcttgagcatattgagccatcagttgtttgtttgtgtaacggatttgacaatgcagagttcaggagcaaaaaaccgcaaaggagagaaagagggaaaggatctcctagtatcccaccttgtggcgcgccctgtcaagtgcatgatggcctggtcgatctgcgtctgctgctgcggttccatcccaacgagtgcctccgacaccttgtcgttgatcacccgcaccgcgtaggcgacccccctggcgaggaacttccgcctctcggaggccccggccgcgtcggcggcggcgccctcgagcgcgcccacgctagccgtagatgctcggtgcacggccttgttggtgtgcaactcgacctcaacggccggtgcgctacgcccgtcaaggatctggcgcgcccgcaccctcgtgatcacggtgggcgcctcccgcctcatgtggccgacgatgaaaagcgccgggttaggggccttggcgcgcaccgccgtattcagggcctcctcgctcttgcgcgagagcaggtgcttccccaggtactcctgcactgacaaggctgccacagcggtggaatttgtcctcacgacttcgccacgtcgtcctcacctccctggcttcccacgactccgccgtatcgaggtgctcggtgggtcgtcttaatccgaagtccgaactaggaagacgagacagagaggtctgaggaatgggcctcgtttgatgttgagctgaattatttttccagcataagcccaggtcttggtccatgaacaaaattactagaaacccagcccagtactacgatctaaaagagggactgccactggatagctctctctagcattctccacgctccaatacagcggcgtcgtgtctatccgggtctatccgcgaacacgtgagaactctccagaaactgctttctcctccacttcatctctctcgctttccctctataaaaagaccccttctaggaattgagggagacagcaagcaccaagcagcgatccgaagctcaatcaattcactcaaacctcttccccaaatcttcgattagatcttcgttgacaagaagactagaaccgaacctgacatgtccaacctgctcacggttcaccagaaccttccggctcttccagtggacgcgacgtccgatgaagtcaggaagaacctcatggacatgttccgcgacaggcaagcgttcagcgagcacacctggaagatgctgctctccgtctgccgctcctgggctgcatggtgcaagctgaacaacaggaagtggttccccgctgagcccgaggacgtgagggattaccttctgtacctgcaagcgcgaggtttgtttctgcttctacctttgatatatatataataattatcattaattagtagtaatataatatttcaaatatttttttcaaaataaaagaatgtagtatatagcaattgcttttctgtagtttataagtgtgtatattttaatttataacttttctaatatatgaccaaaacatggtgatgcctaggtctggcagtgaagaccatccagcaacaccttggacaactgaacatgcttcacaggcgctccggcctcccgcgccccagcgactcgaacgccgtgagcctcgtcatgcgccgcatcaggaaggaaaacgtcgatgccggcgaaagggcaaagcaggccctcgcgttcgagaggaccgatttcgaccaggtccgcagcctgatggagaacagcgacaggtgccaggacattaggaacctggcgttcctcggaattgcatacaacacgctcctcaggatcgcggaaattgcccgcattcgcgtgaaggacattagccgcaccgacggcggcaggatgcttatccacattggcaggaccaagacgctcgtttccaccgcaggcgtcgaaaaggccctcagcctcggagtgaccaagctcgtcgaacgctggatctccgtgtccggcgtcgcggacgacccaaacaactacctcttctgccgcgtccgcaagaacggggtggctgcccctagcgccaccagccaactcagcacgagggccttggaaggtattttcgaggccacccaccgcctgatctacggcgcgaaggatgacagcggtcaacgctacctcgcatggtccgggcactccgcccgcgttggagctgctagggacatggcccgcgccggtgtttccatccccgaaatcatgcaggcgggtggatggacgaacgtgaacattgtcatgaactacattcgcaaccttgacagcgagacgggcgcaatggttcgcctcctggaagatggtgactgaggtacccaacctagacttgtccatcttctggattggccaacttaattaatgtatgaaataaaaggatgcacacatagtgacatgctaatcactataatgtgggcatcaaagttgtgtgttatgtgtaattactagttatctgaataaaagagaaagagatcatccatatttcttatcctaaatgaatgtcacgtgtctttataattctttgatgaaccagatgcatttcattaaccaaatccatatacatataaatattaatcatatataattaatatcaattgggttagcaaaacaaatctagtctaggtgtgttttgcgatccgatatcgaattggccacggtaccagctgctgctgttctagggttcacaagtctgcctatttgtcttccccaatggagctatggttgtctggtctggtccttggtcgtgtcccgtttcattgtgtactatttacctgtaatgtgtatccttaagtctggtttgatggtgtctgaaacgttttgctgtggtagagcagcatggaagaactataatgaataagtgatccctaatcattgtgtccaaattttgcttctgctatacccttttgtgctgtttcttatgttttgcttaaaaatttgatctgacaaacaaatttgtctaaattatgctcttgttctgactgtgtactgtacacatttgtattgctaccggtttggcacatagttttctctttgattgcagatcaaacccttctgattgcagattgcttggctatggctgatgtgctcactgttcttctttagcttgtatattgctgatggtggcttggctacggctgaaaaagttgctgctgcgccgacttggcaactgttgctccagtaatgctttgtcctctcttcctagccgccgacttggcacttggcagctgttgctcctgtaatgcgttgttatctcttatctcttgagatgtactatgattttgaggctgtttgacttgtgccagattgccagtgctgatgctatattatctcaggtttttatgctagtatatgttttactgtgtgctgcctgtgtcgagttacgtaatctattgaaccgctatgcgtgttgatgccctgttgttgcttgccagattgatgcccctgttgcttgcagcttgcaagctgtagtgaaatcctaaaattccaaaccaaatctattctgaacttttgaagatctgtgatgtccggaagaaaagattcaaacagataaacgggactctccagaatctataaaataaatgatcgacaaacgctttgctttggtaggcttcaagcttggtcacccggtccgggcctagaaggccagcttcggccgccccgggcaactttattatacaaagttgatagataaatcagatatctggttcctaaggacccggcggaccgattaaactgattcggtccgacgcgttacctaataacttcgtatagcatacattatacgaagttattagctaactaactagtaagcgtacacctgagcggttaccgaattcctgcccttaaggccaattgttcaagattcattcaacaattgaaacatctcccatgattaaatcagtataaggttgctatggtcttgcttgacaaagtttttttttgagggaatttcaactaaatttttgagtgaaactatcaaatactgattttaaaaaatttttataaaaggaagcgcagagataaaaggccatctatgctacaaaagtacccaaaaatgtaatcctaaagtatgaattgcattttttttttgtttggacgaaaggaaaggagtattaccacaagaatgatatcatcttcatatttagatcttttttgggtaaagcttgagattctctaaatatagagaaatcagaagaaaaaaaaaccgtgttttggtggttttgatttctagcctccacaataactttgacggcgtcgacaagtctaacggacaccaagcagcgaaccaccagcgccgagccaagcgaagcagacggccgagacgttgacaccttcggcgcggcatctctcgagagttccgctccggcgctccacctccaccgctggcggtttcttattccgttccgttccgcctcctgctctgctcctctccacaccacacggcacgaaaccgttacggcaccggcagcacccagcacgggagaggggattcctttcccaccgttccttccctttccgccccgccgctataaatagccagccccatccccagcttttttccccaatctcatctcctctctcctgttgttcggagcacacgcacaatccgatcgatccccaaatccccttcgtctctcctcgcgagcctcgtggatcccagcttcaaggtacggcgatcgatcatcccccctccttctctctaccttcttttctctagactacatcggatggcgatccatggttagggcctgctagtttcccttcctgttttgtcgatggctgcgaggcacaatagatctgatggcgttatgacggctaacttgtcatgttgttgcgatttatagtccctttaggagatcagtttaatttctcggatggttcgagatcggtggtccatggttagtaccctaagatccgcgctgttagggttcgtagatggaggcgacctgttctgattgttaacttgtcagtacctgggaaatcctgggatggttctagctcgtccgcagatgagatcgatttcatgatcctctgtatcttgtttcgttgcctaggttccgtctaatctatccgtggtatgatgtagatgttttgatcgtgctaactacgtcttgtaaagttaattgtcaggtcataatttttagcatgcctttttttttgtttggttttgtctaattgggctgtcgttctagatcagagtagaagactgttccaaactacctgctggatttattgaacttggatctgtatgtgtgtcacatatcttcataaattcatgattaagatggattgaaatatcttttatctttttggtatggatagttctatatgttggtgtggctttgttagatgtatacatgcttagatacatgaagcaacgtgctgctactgtttagtaattgctgttcatttgtctaataaacagataaggatatgtatttatgttgctgttggttttgctggtactttgttggatacaaatgcttcaatacagaaaacagcatgctgctacgatttaccatttatctaatcttatcatatgtctaatctaataaacaaacatgcttttaaattatcttcatatgcttggatgatggcatacacagcggctatgtgtggttttttaaatacccagcatcatgggcatgcatgacactgctttaatatgctttttatttgcttgagactgtttcttttgtttatactgaccctttagttcggtgactcttctgcaggtcgactttaacttagcctaggatccatggcccagtccaagcacggcctgaccaaggagatgaccatgaagtaccgcatggagggctgcgtggacggccacaagttcgtgatcaccggcgagggcatcggctaccccttcaagggcaagcaggccatcaacctgtgcgtggtggagggcggccccttgcccttcgccgaggacatcttgtccgccgccttcatgtacggcaaccgcgtgttcaccgagtacccccaggacatcgtcgactacttcaagaactcctgccccgccggctacacctgggaccgctccttcctgttcgaggacggcgccgtgtgcatctgcaacgccgacatcaccgtgagcgtggaggagaactgcatgtaccacgagtccaagttctacggcgtgaacttccccgccgacggccccgtgatgaagaagatgaccgacaactgggagccctcctgcgagaagatcatccccgtgcccaagcagggcatcttgaagggcgacgtgagcatgtacctgctgctgaaggacggtggccgcttgcgctgccagttcgacaccgtgtacaaggccaagtccgtgccccgcaagatgcccgactggcacttcatccagcacaagctgacccgcgaggaccgcagcgacgccaagaaccagaagtggcacctgaccgagcacgccatcgcctccggctccgccttgccctccggactcagatctcgatagggtaccaatggccagttaacagatccagctgctgctgttctagggttcacaagtctgcctatttgtcttccccaatggagctatggttgtctggtctggtccttggtcgtgtcccgtttcattgtgtactatttacctgtaatgtgtatccttaagtctggtttgatggtgtctgaaacgttttgctgtggtagagcagcatggaagaactataatgaataagtgatccctaatcattgtgtccaaattttgcttctgctatacccttttgtgctgtttcttatgttttgcttaaaaatttgatctgacaaacaaatttgtctaaattatgctcttgttctgactgtgtactgtacacatttgtattgctaccggtttggcacatagttttctctttgattgcagatcaaacccttctgattgcagattgcttggctatggctgatgtgctcactgttcttctttagcttgtatattgctgatggtggcttggctacggctgaaaaagttgctgctgcgccgacttggcaactgttgctccagtaatgctttgtcctctcttcctagccgccgacttggcacttggcagctgttgctcctgtaatgcgttgttatctcttatctcttgagatgtactatgattttgaggctgtttgacttgtgccagattgccagtgctgatgctatattatctcaggtttttatgctagtatatgttttactgtgtgctgcctgtgtcgagttacgtaatctattgaaccgctatgcgtgttgatgccctgttgttgcttgccagattgatgcccctgttgcttgcagcttgcaagctgtagtgaaatcctaaaattcgaaaccaaatctattctgaacttttgaagatctgtgatgtccggaagaaaagattcaaacagataaacgggactctccagaatctataaaataaatgatcgacaaacgctttgctttggtaggcttcctagttagttagcggaccgaagcttcggtccgggcctgcggccgcagatatcagaacctgcgtctggacgcacaagtcatagcattatcggctaaaatttcttaatttctaaattagtcatatcggctaagaaagtggggagcactatcatttcgtagaacaagaacaaggtatcatatatatatatatatataatatttaaactttgttaagtggaatcaaagtgctagtattaatggagtttcatgtgcattaaattttatgtcacatcagcaattttgttgacttggcaaggtcatttagggtgtgtttggaagacaggggctattaggagtattaaacatagtctaattacaaaactaattgcacaaccgctaagctgaatcgcgagatggatctattaagcttaattagtccatgatttgacaatgtggtgctacaataaccatttgctaatgatggattacttaggtttaatagattcgtctcgtgatttagcctatgggttctgctattaattttgtaattagctcatatttagttcttataattagtatccgaacatccaatgtgacatgctaaagtttaaccctggtatccaaatgaagtcttatgagagtttcatcactccggtggtatatgtacttaggctccgttttcttccaccgacttatttttagcacccgtcacattgaatgtttagatactaattagaagtattaaacgtagactatttacaaaatccattacataagacgaatctaaacggcgagacgaatctattaaacctaattagtccatgatttgacaatgtgttgctacagtaaacatttgctaatgatggattaattaggcttaatagattcgtctcgccgtttagcctccacttatgtaatgggttttctaaacaatctacgtttaatactcctaattagtatctaaatattcaatgtgacacgtgctaaaaataagtcagtggaaggaagagaacgtccccttagttttccatcttattaattgtacgatgaaactgtgcagccagatgattgacaatcgcaatacttcaactagtgggccatgcacatcagcgacgtgtaacgtcgtgagttgctgttcccgtagagaaatatcaactggtgggccacgcacatcagcgtcgtgtaacgtggacggaggagccccgtgacggcgtcgacatcgaacggccaccaaccacggaaccacccgtccccacctctcggaagctccgctccacggcgtcgacatctaacggctaccagcaggcgtacgggttggagtggactccttgcctctttgcgctggcggcttccggaaattgcgtggcggagacgaggcgggctcgtctcacacggcacggaagacgtcacgggttccttccccacctctcctcttccccaccgccataaatagccgaccccctcgcctttctccccaatctcatctcgtctcgtgttgttcggagcacaccacccgccccaaatcgttcttcccgcaagcctcggcgatccttcacccgcttcaaggtacggcgatcgtcttcctcctctagatcggcgtgatctgcaagtagttgatttggtagatggttaggatctgtgcactgaagaaatcatgttagatccgcgatgtttctgttcgtagatggctgggaggtggaatttttgtgtagatctgatatgttctcctgtttatcttgtcacgctcctgcgatttgtggggattttaggtcgttgatctgggaatcgtggggttgcttctaggctgttcgtagatgaggtcgttctcacggtttactggatcattgcctagtagatcagctcgggctttcgtctttgtatatggtgcccatacttgcatctatgatctggttccgtggtgttacctaggtttctgcgcctgattcgtccgatcgattttgttagcatgtggtaaacgtttggtcatggtctgatttagattagagtcgaataggatgatctcgatctagctcttgggattaatatgcatgtgtcaccaatctgttccgtggttaagatgatgaatctatgcttagttaatgggtgtagatatatatgctgctgttcctcaatgatgccgtagcttttacctgagcagcatggatcgtcctgttacttaggtagatgcacatgcttatagatcaagatatgtactgctactgttggaattctttagtatacctgatgatcatccatgctcttgttacttgttttggtatacttggatgatggcatgctgctgctttttgttgatttgagcccatccatatctgcatatgtcacatgattaagatgattacgctgtttctgtatgatgccatagcttttatgtgagcaacatgcatcctcctggttatatgcattaatagatggaagatatctattgctacaatttgatgattattttgtacatacgatgatcaagcatgctcttcatactttgttgatatacttggataatgaaatgctgctgcacgttcattctatagcactaatgatgtgatgaacacgcacgacctgtttgtggcatctgtttgaatgtgttgttgctgttcactagagactgttttattaacctactgctagatacttacccttctgtctgtttattcttttgcagccagaatagcggatccgcccatggtcgaacaggacggcctgcatgcaggatcaccagcggcctgggtcgaaagactcttcggctacgactgggcacaacagaccatcgggtgtagcgacgcagctgttttcaggctgtccgcacagggcagacccgttttgttcgtcaaaacagacctgtctggcgcgctcaacgaactgcaagacgaggccgcaagactgagctggcttgctaccacaggcgttccttgtgctgcagtcctcgacgtcgttactgaggctggaagagactggctgctcctgggtgaagtcccaggacaggaccttttgtccagccatctggcacctgccgaaaaggtcagcatcatggcagacgccatgagaaggctgcacacactcgaccctgcaacatgccccttcgatcaccaggcaaaacacaggatcgagcgcgcaagaacgcgcatggaggctggtttggtcgaccaagatgacctcgacgaggaacaccaaggactggctcctgctgaactcttcgccagactcaaggcgagaatgccagacggtgacgacctggtcgtcacacacggcgacgcttgtctcccaaacataatggtcgagaacggacgcttcagcggtttcatcgactgcggtagactcggagtcgctgacagataccaggacatcgccctggcaacacgcgacatcgcagaggaactcggaggcgaatgggctgacaggtttctcgtgctctacggtatcgctgctccagacagccagaggatcgcattctacaggctcctcgacgagttcttttagttcgaacggtacccggggatcctctagtgccgtgggtcgtttaagctgccgctgtacctgtgtcgtctggtgccttctggtgtacctgggaggttgtcgtctatcaagtatctgtggttggtgtcatgagtcagtgagtcccaatactgttcgtgtcctgtgtgcattatacccaaaactgttatgggcaaatcatgaataagcttgatgttcgaacttaaaagtctctgctcaatatggtattatggttgtttttgttcgtctcctaatatttgcctgggatcaaattttattggctggtgttcatttgacctccatgttcttgctaggctccattttttactctacagccataatatgtttgattgtttggtttgttctttgttgtacacctggttctgtcgagcttagttttcgacactggcttacagcttaacatgttgctattttattgggttctgattgctattttattgggttctgattgctagtttttgctgaatccaaaaaccatgttatttatttaagcgatccaggttattattatgatggtggctaagtttttttttttccaagggtaaattttctggattctccagtgtttctgtggccgaattcaatcactagagtcgacctgcatgattccgatgacttcgtaggttcctagctcaagccgctcgtgtccaagcgtcacttacgattagctaatgattacggcatctaggaccgactagctagctagctaagagctcggtaccgagctcgaattcattccgattaatcgtggcctcttgctcttcaggatgaagagctatgtttaaacgtgcaagcgctactagacaattcagtacattaaaaacgtccgcaatgtgttattaagttgtctaagcgtcaatttgtttacaccacaatatatcctgcca

SEQ ID NO: 169 - DNA, 22038 bp, synthetic construct
  source 1..22038: mol_type = other DNA
gtttacccgccaatatatcctgtcaaacactgcggccgcacttgaccgcggatggagccggagctgtggtgaggccatcgacgggaggtgggggagaacacagtctcagtgttctttgtgagtccgcaaggtttttagcttttctgtattaattaaggttgctgttggctgtagaatacggtcgtggaagagctgtatcggtagctactacgtaagctattatatactggaagtctggagctcgtcgatctccggtcgtcttcctccatttctcctcgtcttgctttgactgctgctaccatttgcttctgttttctgatgaagcatgccatgtcggccaccagtgtttgtgtggtttttgcagggaatggctttcaagtgctgtgattgaatggccctcgtcgtcctcggctgagctcacatggacgcgtcatgtgagtgagatatatgatcatatgatgagtggggttcgggtgagtgcgtacttgaagtaggatcccgctttcactcattcattcattggcctttaaaccgggaaattttcgcgaggagatggagggaagcaagcagggtgacgagtgcagagtgccgcgagcgctttgtcaaaaggcaccgccgtaggcaaaaaaatcaatggccctgactgactcgatggtagtactactgtagagactagagagggttgctccccatatcttcgtgtgacttttactccagcattgcatttccgtcattgagacgttaattaatagcagctttcgggacagatgactgtggccatgtttcgtcacggccgcttcgtgccagctgggggtactatagtactgtgattttgttagtaaaaactttcattaggccaccattgacgaccgggccttcgcttttgctgcgctaattaaccatttcccggcgaccgaagggaacatgaacatgccccgacacatgagggcatgaggactagtgttctccctgtcgttcgttgacttgactagtgatagtttaaacgctcttcaactggaagagcggttactaccggttcactagctagctgctaatcgagctagttaccctatgaggtgacatgaagcgctcacggttactatgacggttagcttcacgactgttggtggcagtagcgtacgacttagctatagttccggacttacccttaagataacttcgtatagcatacattatacgaagttatgggcccacgcgtgaagagcggttaccagagctggtcacctttgtccaccaagatggaactgtcttcggccagaatggccatctggattcagcaggcctagaaggccatttatcgctatcaactttgtatagaaaagttgggccgaattcgagctcggtacggccagaatggcccggaccgaagcttgcggccgcacactgatagtttaaactgaaggcgggaaacgacaatctgatcatgagcggagaattaagggagtcacgttatgacccccgccgatgacgcgggacaagccgttttacgtttggaactgacagaaccgcaacgttgaaggagccactcagccgcgggtttctggagtttaatgagctaagcacatacgtcagaaaccattattgcgcgttcaaaagtcgcctaaggtcactatcagctagcaaatatttcttgtcaaaaatgctccactgacgttccataaattcccctcggtatccaattagagtctcatattcactctcccgggggatctcgactctagaggatcgctcaggaaggccgctgagatagaggcatggcggccaatgcgggcggcggtggagcgggaggaggcagcggcagcggcagcgtggctgcgccggcggtgtgccgccccagcggctcgcggtggacgccgacgccggagcagatcaggatgctgaaggagctctactacggctgcggcatccggtcgcccagctcggagcagatccagcgcatcaccgccatgctgcggcagcacggcaagatcgagggcaagaacgtcttctactggttccagaaccacaaggcccgcgagcgccagaagcgccgcctcaccagcctcgacgtcaacgtgcccgccgccggcgcggccgacgccaccaccagccaactcggcgtcctctcgctgtcgtcgccgccgccttcaggcgcggcgcctccctcgcccaccctcggcttctacgccgccggcaatggcggcggatcggctgtgctgctggacacgagttccgactggggcagcagcggcgctgccatggccaccgagacatgcttcctgcaggactacatgggcgtgacggacacgggcagctcgtcgcagtggccacgcttctcgtcgtcggacacgataatggcggcggccgcggcgcgggcggcgacgacgcgggcgcccgagacgctccctctcttcccgacctgcggcgacgacggcggcagcggtagcagcagctacttgccgttctggggtgccgcgtccacaactgccggcgccacttcttccgttgcgatccagcagcaacaccagctgcaggagcagtacagcttttacagcaacagcaacagcacccagctggccggcaccggcaaccaagacgtatcggcaacagcagcagcagccgccgccctggagctgagcctcagctcatggtgctccccttaccctgctgcagggagtatgtgagagcaacgcgagctgccactgctcttcactgatgtctctggaatggaaggaggaggaagtgagcatagcgttggtgcgttgctgtcaagggcgaattcacatggttaaccgacaaagcagcattagtccgttgatcggtggaagaccactcgtcagtgttgagttgaatgtttgatcaataaaatacggcaatgctgtaagggttgttttttatgccattgataatacactgtactgttcagttgttgaactctatttcttagccatgccaagtgcttttcttattttgaataacattacagcaaaaagttgaaagacaaaaaaaaaaacccccgaacagagtgctttgggtcccaagcttctttagactgtgttcggcgttccccctaaatttctccccctatatctcactcacttgtcacatcagcgttctctttccccctatatctccacgctctacagcagttccacctatatcaaacctctataccccaccacaacaatattatatactttcatcttcaactaactcatgtaccttccaatttttttctactaataattatttacgtgcacagaaacttagcaaggagagagagagcgggaatgcggccgccaccgcggtggagctcgaattccggtccgggcctagaaggccagcttcaagtttgtacaaaaaagcaggctccggccagaatctcactgactagctaaacagcggccgcatcgagcagctggcttgtggggaccagacaaaaaaggaatggtgcagaattgttaggcgcacctaccaaaagcatctttgcctttattgcaaagataaagcagattcctctagtacaagtggggaacaaaataacgtggaaaagagctgtcctgacagcccactcactaatgcgtatgacgaacgcagtgacgaccacaaaactcgagcaacgagatcatgagccaatcaaagaggagtgatgtagacctaaagcaataatggagccatgacgtaagggcttacgcccatacgaaataattaaaggctgatgtgacctgtcggtctctcagaacctttactttttatgtttggcgtgtatttttaaatttccacggcaatgacgatgtgaccgtcgacccactaaaacattgctttgtcaaaagctaaaaaagatgatgcccgacagccacttgtgtgaagcatgagaagccggtccctccactaagaaaattagtgaagcatcttccagtggtccctccactcacagctcaatcagtgagcaacaggacgaaggaaatgacgtaagccatgacgtctaatcccagggcccggtgaccaatcgaattagcttggcgcgtggaccgaagcttgcatgcctgcagtgcagcgtgacccggtcgtgcccctctctagagataatgagcattgcatgtctaagttataaaaaattaccacatattttttttgtcacacttgtttgaagtgcagtttatctatctttatacatatatttaaactttactctacgaataatataatctatagtactacaataatatcagtgttttagagaatcatataaatgaacagttagacatggtctaaaggacaattgagtattttgacaacaggactctacagttttatctttttagtgtgcatgtgttctcctttttttttgcaaatagcttcacctatataatacttcatccattttattagtacatccatttagggtttagggttaatggtttttatagactaatttttttagtacatctattttattctattttagcctctaaattaagaaaactaaaactctattttagtttttttatttaataatttagatataaaatagaataaaataaagtgactaaaaattaaacaaataccctttaagaaattaaaaaaactaaggaaacatttttcttgtttcgagtagataatgccagcctgttaaacgccgtcgacgagtctaacggacaccaaccagcgaaccagcagcgtcgcgtcgggccaagcgaagcagacggcacggcatctctgtcgctgcctctggacccctctcgagagttccgctccaccgttggacttgctccgctgtcggcatccagaaattgcgtggcggagcggcagacgtgagccggcacggcaggcggcctcctcctcctctcacggcaccggcagctacgggggattcctttcccaccgctccttcgctttcccttcctcgcccgccgtaataaatagacaccccctccacaccctctttccccaacctcgtgttgttcggagcgcacacacacacaaccagatctcccccaaatccacccgtcggcacctccgcttcaaggtacgccgctcgtcctcccccccccccctctctaccttctctagatcggcgttccggtccatgcatggttagggcccggtagttctacttctgttcatgtttgtgttagatccgtgtttgtgttagatccgtgctgctagcgttcgtacacggatgcgacctgtacgtcagacacgttctgattgctaacttgccagtgtttctctttggggaatcctgggatggctctagccgttccgcagacgggatcgatttcatgattttttttgtttcgttgcatagggtttggtttgcccttttcctttatttcaatatatgccgtgcacttgtttgtcgggtcatcttttcatgcttttttttgtcttggttgtgatgatgtggtctggttgggcggtcgttctagatcggagtagaattctgtttcaaactacctggtggatttattaattttggatctgtatgtgtgtgccatacatattcatagttacgaattgaagatgatggatggaaatatcgatctaggataggtatacatgttgatgcgggttttactgatgcatatacagagatgctttttgttcgcttggttgtgatgatgtggtgtggttgggcggtcgttcattcgttctagatcggagtagaatactgtttcaaactacctggtgtatttattaattttggaactgtatgtgtgtgtcatacatcttcatagttacgagtttaagatggatggaaatatcgatctaggataggtatacatgttgatgtgggttttactgatgcatatacatgatggcatatgcagcatctattcatatgctctaaccttgagtacctatctattataataaacaagtatgttttataattattttgatcttgatatacttggatgatggcatatgcagcagctatatgtggatttttttagcactgccttcatacgctatttatttgcttggtactgtttcttttgtcgatgctcaccctgttgtttggtgttacttctgcaggtcgactttaacttagcctaggatccatggacacgttcgggcagcgcacgtcgatttaccgtggcgtgacaaggcatagatggactgggagatatgaggcacatctttgggataacagttgcagaagggaagggcaaactcgtaagggtcgtcaagtctatttaggtggctatgataaagaggagaaagctgctagggcttatgatcttgctgctctgaagtactggggtgccacaacaacaacaaattttccagtgagtaactacgaaaaggagctcgaggacatgaagcacatgacaaggcaggagtttgtagcgtctctgagaaggaagagcagtggtttctccagaggtgcatccatttacaggggagtgactaggcatcaccaacatggaagatggcaagcacggattggacgagttgcagggaacaaggatctttacttgggcaccttcagcacccaggaggaggcagcggaggcgtacgacatcgcggcgatcaagttccgcggcctcaacgccgtcaccaacttcgacatgagccgctacgacgtgaagagcatcctggacagcagcgccctccccatcggcagcgccgccaagcgcctcaaggaggccgaggccgcagcgtccgcgcagcaccaccacgccggcgtggtgagctacgacgtcggccgcatcgcctcgcagctcggcgacggcggagccctggcggcggcgtacggcgcgcactaccacggcgccgcctggccgaccatcgcgttccagccgggcgccgccagcacaggcctgtaccacccgtacgcgcagcagccaatgcgcggcggcgggtggtgcaagcaggagcaggaccacgcggtgatcgcggccgcgcacagcctgcaggacctccaccacctgaacctgggcgcggccggcgcgcacgactttttctcggcagggcagcaggccgccgccgctgcgatgcacggcctgggtagcatcgacagtgcgtcgctcgagcacagcaccggctccaactccgtcgtctacaacggcggggtcggcgacagcaacggcgccagcgccgtcggcggcagtggcggtggctacatgatgccgatgagcgctgccggagcaaccactacatcggcaatggtgagccacgagcaggtgcatgcacgggcctacgacgaagccaagcaggctgctcagatggggtacgagagctacctggtgaacgcggagaacaatggtggcggaggtggaggcggctcgggtggcggaggctccggaggcggtggctcgacgtgcgccaaggacatccaaaaagcagccgcggaggcggcactcgcctttcaggacgagacctgcgacaccaccaccaccaaccacggcctcgacatggaggagaccatggtcgaagccatctacacccccgagcagagcgagggcgccttctacatggacgaagagacaatgttcggcatgccaaccctcctcgacaacatggccgaaggcatgctgctgccgcccccgagcgtccagtggaaccacaactacgacggcgaaggcgacggggatgtgtccctgtggagctactagggtacctgacatcttatagtctgcaacctctcgtgtctgaattcctatctttatcaagtgttattgcttccacgactataggacagctttcgtcgaaagcttttgctcatgtgatctcgaaggattcatctagtctgatttttcgtgacttgtatcggttttattggattcatccaacatatatcaataaaaaatgagttgtgtttcctttcttcctagttcagttaaaattatttccctcctgcgcttgtgctgtaattgtctgtgtacctgttgtttgtgactgtgttagttcccttggatatgatttcgtatttgatatgtacatggagatagcttagcttcattattggagtatgaagttagtatgacatagtcactctcctggaaaattgacactgcaaaccatatttttattctgaaccacaaatcctagtcagtccgctggcatatgccgtccgtttgctgaatccagaacgtgggtttggagatgtacggctgagatgcctctatgcgaaggggatttcgtggtgaaacgagatgggagtagagcaacgcccgtggaagatgcttcaaacttccacacttttgagcaacgatcggcagtagtaaggtagacgatttcaagatcaaagcatatgaagataaacaacatcaacaacaaaatttgttggggttctatagagagaaacagagctacatacatacactgttttgtatctaccatctgagatgatgaaaagatgaaaaactaaagaatgccccggcgccaacgccaggacacgccgcgcgcgcgtcacccgagccatctcttgacccagccggcgctgtatatttacacacgttgcagcatcgatcaccacctgttcgatcgcgtcgccgtcaccggcgcgccgcgacttattgaactagtctagggcgcggctaacaacctagcttagattgccttgtctaaacccttaggctaacgcgccactctagaaggccgatctcccccgaacgcgccagatccgatatcgatgggccctggccgaagcttggtcacccggtccgggcctagaaggccgatctcccgggcacccagctttcttgtacaaagtggccgttaacggatcggccagaatggcccggaccgggttaccccgcggttcaaagccaatgactgttgttaggtccagtttctaaggacgaatcatccaatcactggttctttctgaacaaaacaaagagctatagagttacgttactgtagccgagacagagcctgcaatctggttatgccacatactaggttctttcttaaagttgactcactctatcctaagttctacttacaaggagctacaacaaattggtcataaccggagagcgttcaaggaggtaatatcccatcttactctgtagcaaggctacaaaaggagagctaaagaactaggctacaaaaagagagctaaagaactaactatctagcaagactacagagctatagtgtagagatttcataaccggtgagcgttcaaggatactttgaagagaagaggtaatatctcaactagcaagactacaaaaaaatggagatataaaactaactgtctaacaagactacagagctatagtagagatagatacgttcgacacttaagcatgagaattcgagctcggtaccctggttcacaaactcaatacaacacacagtggagtagggtattacgctccggcggcccgaaccactctaaatccttgtgtcctcgtgtgctcttccaccattaatgactgtaattgcagggacacgaagagttgtagcgcttttgccaacaagatccgctatatgctagtagagtggaacctgcacagcaacaagcatccaataatctgagaataagaattatgtgtggtgatggttctcatctctgcaactcgccattttcgcgagagaaccaaatccaagttggtgaagatcatgatttgggctcatgggctggcatagtagctattacctttgcaattgtggttcgaatctatccgatattctccttttcagggagagctaatgcttatgcttattgggtattttggtttgacactgcttcacgcccaaaaaaaggcaactatgtctgagttggatatggcccaaaaaaaggcagctatgtctgagttggatatggaagtcttctttcgtttagggtgaagtaagaccaagctcatgagcttattatcttaggtcggaacaaattagttgataggcatggcacatttatcaaattataatgattttaacagaaaagcaacacctctttttcagcagcaccagctttgcaagctgcaattgacactccaagcatagtatttgctccaaactcagcctgcatttcgcacaatatcatatctatttccatttggataaaatatattttccagaaatatgggaacagaatcaagatacagaaaaaagttgtggtagtagtggtaagtggaaacacaagtacagtgaaaagatagcattatttctgaacagtcaaattaaccgaaataagtagtatcacatactgcccctaaattgactacacccaatgtaaagaattgcttgagcatattgagccatcagttgtttgtttgtgtaacggatttgacaatgcagagttcaggagcaaaaaaccgcaaaggagagaaagagggaaaggatctcctagtatcccaccttgtggcgcgccctgtcaagtgcatgatggcctggtcgatctgcgtctgctgctgcggttccatcccaacgagtgcctccgacaccttgtcgttgatcacccgcaccgcgtaggcgacccccctggcgaggaacttccgcctctcggaggccccggccgcgtcggcggcggcgccctcgagcgcgcccacgctagccgtagatgctcggtgcacggccttgttggtgtgcaactcgacctcaacggccggtgcgctacgcccgtcaaggatctggcgcgcccgcaccctcgtgatcacggtgggcgcctcccgcctcatgtggccgacgatgaaaagcgccgggttaggggccttggcgcgcaccgccgtattcagggcctcctcgctcttgcgcgagagcaggtgcttccccaggtactcctgcactgacaaggctgccacagcggtggaatttgtcctcacgacttcgccacgtcgtcctcacctccctggcttcccacgactccgccgtatcgaggtgctcggtgggtcgtcttaatccgaagtccgaactaggaagacgagacagagaggtctgaggaatgggcctcgtttgatgttgagctgaattatttttccagcataagcccaggtcttggtccatgaacaaaattactagaaacccagcccagtactacgatctaaaagagggactgccactggatagctctctctagcattctccacgctccaatacagcggcgtcgtgtctatccgggtctatccgcgaacacgtgagaactctccagaaactgctttctcctccacttcatctctctcgctttccctctataaaaagaccccttctaggaattgagggagacagcaagcaccaagcagcgatccgaagctcaatcaattcactcaaacctcttccccaaatcttcgattagatcttcgttgacaagaagactagaaccgaacctgacatgtccaacctgctcacggttcaccagaaccttccggctcttccagtggacgcgacgtccgatgaagtcaggaagaacctcatggacatgttccgcgacaggcaagcgttcagcgagcacacctggaagatgctgctctccgtctgccgctcctgggctgcatggtgcaagctgaacaacaggaagtggttccccgctgagcccgaggacgtgagggattaccttctgtacctgcaagcgcgaggtttgtttctgcttctacctttgatatatatataataattatcattaattagtagtaatataatatttcaaatatttttttcaaaataaaagaatgtagtatatagcaattgcttttctgtagtttataagtgtgtatattttaatttataacttttctaatatatgaccaaaacatggtgatgcctaggtctggcagtgaagaccatccagcaacaccttggacaactgaacatgcttcacaggcgctccggcctcccgcgccccagcgactcgaacgccgtgagcctcgtcatgcgccgcatcaggaaggaaaacgtcgatgccggcgaaagggcaaagcaggccctcgcgttcgagaggaccgatttcgaccaggtccgcagcctgatggagaacagcgacaggtgccaggacattaggaacctggcgttcctcggaattgcatacaacacgctcctcaggatcgcggaaattgcccgcattcgcgtgaaggacattagccgcaccgacggcggcaggatgcttatccacattggcaggaccaagacgctcgtttccaccgcaggcgtcgaaaaggccctcagcctcggagtgaccaagctcgtcgaacgctggatctccgtgtccggcgtcgcggacgacccaaacaactacctcttctgccgcgtccgcaagaacggggtggctgcccctagcgccaccagccaactcagcacgagggccttggaaggtattttcgaggccacccaccgcctgatctacggcgcgaaggatgacagcggtcaacgctacctcgcatggtccgggcactccgcccgcgttggagctgctagggacatggcccgcgccggtgtttccatccccgaaatcatgcaggcgggtggatggacgaacgtgaacattgtcatgaactacattcgcaaccttgacagcgagacgggcgcaatggttcgcctcctggaagatggtgactgaggtacccaacctagacttgtccatcttctggattggccaacttaattaatgtatgaaataaaaggatgcacacatagtgacatgctaatcactataatgtgggcatcaaagttgtgtgttatgtgtaattactagttatctgaataaaagagaaagagatcatccatatttcttatcctaaatgaatgtcacgtgtctttataattctttgatgaaccagatgcatttcattaaccaaatccatatacatataaatattaatcatatataattaatatcaattgggttagcaaaacaaatctagtctaggtgtgttttgcgatccgatatcgaattggccacggtaccagctgctgctgttctagggttcacaagtctgcctatttgtcttccccaatggagctatggttgtctggtctggtccttggtcgtgtcccgtttcattgtgtactatttacctgtaatgtgtatccttaagtctggtttgatggtgtctgaaacgttttgctgtggtagagcagcatggaagaactataatgaataagtgatccctaatcattgtgtccaaattttgcttctgctatacccttttgtgctgtttcttatgttttgcttaaaaatttgatctgacaaacaaatttgtctaaattatgctcttgttctgactgtgtactgtacacatttgtattgctaccggtttggcacatagttttctctttgattgcagatcaaacccttctgattgcagattgcttggctatggctgatgtgctcactgttcttctttagcttgtatattgctgatggtggcttggctacggctgaaaaagttgctgctgcgccgacttggcaactgttgctccagtaatgctttgtcctctcttcctagccgccgacttggcacttggcagctgttgctcctgtaatgcgttgttatctcttatctcttgagatgtactatgattttgaggctgtttgacttgtgccagattgccagtgctgatgctatattatctcaggtttttatgctagtatatgttttactgtgtgctgcctgtgtcgagttacgtaatctattgaaccgctatgcgtgttgatgccctgttgttgcttgccagattgatgcccctgttgcttgcagcttgcaagctgtagtgaaatcctaaaattccaaaccaaatctattctgaacttttgaagatctgtgatgtccggaagaaaagattcaaacagataaacgggactctccagaatctataaaataaatgatcgacaaacgctttgctttggtaggcttcaagcttggtcacccggtccgggcctagaaggccagcttcggccgccccgggcaactttattatacaaagttgatagataaatcagatatctggttcctaaggacccggcggaccgattaaactgattcggtccgacgcgttacctaataacttcgtatagcatacattatacgaagttattagctaactaactagtaagcgtacacctgagcggttaccgaattcctgcccttaaggccaattgttcaagattcattcaacaattgaaacatctcccatgattaaatcagtataaggttgctatggtcttgcttgacaaagtttttttttgagggaatttcaactaaatttttgagtgaaactatcaaatactgattttaaaaaatttttataaaaggaagcgcagagataaaaggccatctatgctacaaaagtacccaaaaatgtaatcctaaagtatgaattgcattttttttttgtttggacgaaaggaaaggagtattaccacaagaatgatatcatcttcatatttagatcttttttgggtaaagcttgagattctctaaatatagagaaatcagaagaaaaaaaaaccgtgttttggtggttttgatttctagcctccacaataactttgacggcgtcgacaagtctaacggacaccaagcagcgaaccaccagcgccgagccaagcgaagcagacggccgagacgttgacaccttcggcgcggcatctctcgagagttccgctccggcgctccacctccaccgctggcggtttcttattccgttccgttccgcctcctgctctgctcctctccacaccacacggcacgaaaccgttacggcaccggcagcacccagcacgggagaggggattcctttcccaccgttccttccctttccgccccgccgctataaatagccagccccatccccagcttttttccccaatctcatctcctctctcctgttgttcggagcacacgcacaatccgatcgatccccaaatccccttcgtctctcctcgcgagcctcgtggatcccagcttcaaggtacggcgatcgatcatcccccctccttctctctaccttcttttctctagactacatcggatggcgatccatggttagggcctgctagtttcccttcctgttttgtcgatggctgcgaggcacaatagatctgatggcgttatgacggctaacttgtcatgttgttgcgatttatagtccctttaggagatcagtttaatttctcggatggttcgagatcggtggtccatggttagtaccctaagatccgcgctgttagggttcgtagatggaggcgacctgttctgattgttaacttgtcagtacctgggaaatcctgggatggttctagctcgtccgcagatgagatcgatttcatgatcctctgtatcttgtttcgttgcctaggttccgtctaatctatccgtggtatgatgtagatgttttgatcgtgctaactacgtcttgtaaagttaattgtcaggtcataatttttagcatgcctttttttttgtttggttttgtctaattgggctgtcgttctagatcagagtagaagactgttccaaactacctgctggatttattgaacttggatctgtatgtgtgtcacatatcttcataaattcatgattaagatggattgaaatatcttttatctttttggtatggatagttctatatgttggtgtggctttgttagatgtatacatgcttagatacatgaagcaacgtgctgctactgtttagtaattgctgttcatttgtctaataaacagataaggatatgtatttatgttgctgttggttttgctggtactttgttggatacaaatgcttcaatacagaaaacagcatgctgctacgatttaccatttatctaatcttatcatatgtctaatctaataaacaaacatgcttttaaattatcttcatatgcttggatgatggcatacacagcggctatgtgtggttttttaaatacccagcatcatgggcatgcatgacactgctttaatatgctttttatttgcttgagactgtttcttttgtttatactgaccctttagttcggtgactcttctgcaggtcgactttaacttagcctaggatccatggcccagtccaagcacggcctgaccaaggagatgaccatgaagtaccgcatggagggctgcgtggacggccacaagttcgtgatcaccggcgagggcatcggctaccccttcaagggcaagcaggccatcaacctgtgcgtggtggagggcggccccttgcccttcgccgaggacatcttgtccgccgccttcatgtacggcaaccgcgtgttcaccgagtacccccaggacatcgtcgactacttcaagaactcctgccccgccggctacacctgggaccgctccttcctgttcgaggacggcgccgtgtgcatctgcaacgccgacatcaccgtgagcgtggaggagaactgcatgtaccacgagtccaagttctacggcgtgaacttccccgccgacggccccgtgatgaagaagatgaccgacaactgggagccctcctgcgagaagatcatccccgtgcccaagcagggcatcttgaagggcgacgtgagcatgtacctgctgctgaaggacggtggccgcttgcgctgccagttcgacaccgtgtacaaggccaagtccgtgccccgcaagatgcccgactggcacttcatccagcacaagctgacccgcgaggaccgcagcgacgccaagaaccagaagtggcacctgaccgagcacgccatcgcctccggctccgccttgccctccggactcagatctcgatagggtaccaatggccagttaacagatccagctgctgctgttctagggttcacaagtctgcctatttgtcttccccaatggagctatggttgtctggtctggtccttggtcgtgtcccgtttcattgtgtactatttacctgtaatgtgtatccttaagtctggtttgatggtgtctgaaacgttttgctgtggtagagcagcatggaagaactataatgaataagtgatccctaatcattgtgtccaaattttgcttctgctatacccttttgtgctgtttcttatgttttgcttaaaaatttgatctgacaaacaaatttgtctaaattatgctcttgttctgactgtgtactgtacacatttgtattgctaccggtttggcacatagttttctctttgattgcagatcaaacccttctgattgcagattgcttggctatggctgatgtgctcactgttcttctttagcttgtatattgctgatggtggcttggctacggctgaaaaagttgctgctgcgccgacttggcaactgttgctccagtaatgctttgtcctctcttcctagccgccgacttggcacttggcagctgttgctcctgtaatgcgttgttatctcttatctcttgagatgtactatgattttgaggctgtttgacttgtgccagattgccagtgctgatgctatattatctcaggtttttatgctagtatatgttttactgtgtgctgcctgtgtcgagttacgtaatctattgaaccgctatgcgtgttgatgccctgttgttgcttgccagattgatgcccctgttgcttgcagcttgcaagctgtagtgaaatcctaaaattcgaaaccaaatctattctgaacttttgaagatctgtgatgtccggaagaaaagattcaaacagataaacgggactctccagaatctataaaataaatgatcgacaaacgctttgctttggtaggcttcctagttagttagcggaccgaagcttcggtccgggcctgcggccgcagatatcagaacctgcgtctggacgcacaagtcatagcattatcggctaaaatttcttaatttctaaattagtcatatcggctaagaaagtggggagcactatcatttcgtagaacaagaacaaggtatcatatatatatatatatataatatttaaactttgttaagtggaatcaaagtgctagtattaatggagtttcatgtgcattaaattttatgtcacatcagcaattttgttgacttggcaaggtcatttagggtgtgtttggaagacaggggctattaggagtattaaacatagtctaattacaaaactaattgcacaaccgctaagctgaatcgcgagatggatctattaagcttaattagtccatgatttgacaatgtggtgctacaataaccatttgctaatgatggattacttaggtttaatagattcgtctcgtgatttagcctatgggttctgctattaattttgtaattagctcatatttagttcttataattagtatccgaacatccaatgtgacatgctaaagtttaaccctggtatccaaatgaagtcttatgagagtttcatcactccggtggtatatgtacttaggctccgttttcttccaccgacttatttttagcacccgtcacattgaatgtttagatactaattagaagtattaaacgtagactatttacaaaatccattacataagacgaatctaaacggcgagacgaatctattaaacctaattagtccatgatttgacaatgtgttgctacagtaaacatttgctaatgatggattaattaggcttaatagattcgtctcgccgtttagcctccacttatgtaatgggttttctaaacaatctacgtttaatactcctaattagtatctaaatattcaatgtgacacgtgctaaaaataagtcagtggaaggaagagaacgtccccttagttttccatcttattaattgtacgatgaaactgtgcagccagatgattgacaatcgcaatacttcaactagtgggccatgcacatcagcgacgtgtaacgtcgtgagttgctgttcccgtagagaaatatcaactggtgggccacgcacatcagcgtcgtgtaacgtggacggaggagccccgtgacggcgtcgacatcgaacggccaccaaccacggaaccacccgtccccacctctcggaagctccgctccacggcgtcgacatctaacggctaccagcaggcgtacgggttggagtggactccttgcctctttgcgctggcggcttccggaaattgcgtggcggagacgaggcgggctcgtctcacacggcacggaagacgtcacgggttccttccccacctctcctcttccccaccgccataaatagccgaccccctcgcctttctccccaatctcatctcgtctcgtgttgttcggagcacaccacccgccccaaatcgttcttcccgcaagcctcggcgatccttcacccgcttcaaggtacggcgatcgtcttcctcctctagatcggcgtgatctgcaagtagttgatttggtagatggttaggatctgtgcactgaagaaatcatgttagatccgcgatgtttctgttcgtagatggctgggaggtggaatttttgtgtagatctgatatgttctcctgtttatcttgtcacgctcctgcgatttgtggggattttaggtcgttgatctgggaatcgtggggttgcttctaggctgttcgtagatgaggtcgttctcacggtttactggatcattgcctagtagatcagctcgggctttcgtctttgtatatggtgcccatacttgcatctatgatctggttccgtggtgttacctaggtttctgcgcctgattcgtccgatcgattttgttagcatgtggtaaacgtttggtcatggtctgatttagattagagtcgaataggatgatctcgatctagctcttgggattaatatgcatgtgtcaccaatctgttccgtggttaagatgatgaatctatgcttagttaatgggtgtagatatatatgctgctgttcctcaatgatgccgtagcttttacctgagcagcatggatcgtcctgttacttaggtagatgcacatgcttatagatcaagatatgtactgctactgttggaattctttagtatacctgatgatcatccatgctcttgttacttgttttggtatacttggatgatggcatgctgctgctttttgttgatttgagcccatccatatctgcatatgtcacatgattaagatgattacgctgtttctgtatgatgccatagcttttatgtgagcaacatgcatcctcctggttatatgcattaatagatggaagatatctattgctacaatttgatgattattttgtacatacgatgatcaagcatgctcttcatactttgttgatatacttggataatgaaatgctgctgcacgttcattctatagcactaatgatgtgatgaacacgcacgacctgtttgtggcatctgtttgaatgtgttgttgctgttcactagagactgttttattaacctactgctagatacttacccttctgtctgtttattcttttgcagccagaatagcggatccgcccatggtcgaacaggacggcctgcatgcaggatcaccagcggcctgggtcgaaagactcttcggctacgactgggcacaacagaccatcgggtgtagcgacgcagctgttttcaggctgtccgcacagggcagacccgttttgttcgtcaaaacagacctgtctggcgcgctcaacgaactgcaagacgaggccgcaagactgagctggcttgctaccacaggcgttccttgtgctgcagtcctcgacgtcgttactgaggctggaagagactggctgctcctgggtgaagtcccaggacaggaccttttgtccagccatctggcacctgccgaaaaggtcagcatcatggcagacgccatgagaaggctgcacacactcgaccctgcaacatgccccttcgatcaccaggcaaaacacaggatcgagcgcgcaagaacgcgcatggaggctggtttggtcgaccaagatgacctcgacgaggaacaccaaggactggctcctgctgaactcttcgccagactcaaggcgagaatgccagacggtgacgacctggtcgtcacacacggcgacgcttgtctcccaaacataatggtcgagaacggacgcttcagcggtttcatcgactgcggtagactcggagtcgctgacagataccaggacatcgccctggcaacacgcgacatcgcagaggaactcggaggcgaatgggctgacaggtttctcgtgctctacggtatcgctgctccagacagccagaggatcgcattctacaggctcctcgacgagttcttttagttcgaacggtacccggggatcctctagtgccgtgggtcgtttaagctgccgctgtacctgtgtcgtctggtgccttctggtgtacctgggaggttgtcgtctatcaagtatctgtggttggtgtcatgagtcagtgagtcccaatactgttcgtgtcctgtgtgcattatacccaaaactgttatgggcaaatcatgaataagcttgatgttcgaacttaaaagtctctgctcaatatggtattatggttgtttttgttcgtctcctaatatttgcctgggatcaaattttattggctggtgttcatttgacctccatgttcttgctaggctccattttttactctacagccataatatgtttgattgtttggtttgttctttgttgtacacctggttctgtcgagcttagttttcgacactggcttacagcttaacatgttgctattttattgggttctgattgctattttattgggttctgattgctagtttttgctgaatccaaaaaccatgttatttatttaagcgatccaggttattattatgatggtggctaagtttttttttttccaagggtaaattttctggattctccagtgtttctgtggccgaattcaatcactagagtcgacctgcaggacctcgggacgtcggatctagttagttagagacaccgcccgtctctaattagctaagcagggccgaacctaacccctaattaactagctagctaagagctcggtaccgagctcgaattcattccgattaatcgtggcctcttgctcttcaggatgaagagctatgtttaaacgtgcaagcgctactagacaattcagtacattaaaaacgtccgcaatgtgttattaagttgtctaagcgtcaatttgtttacaccacaatatatcctgcca

SEQ ID NO: 170 - DNA, 25396 bp, synthetic construct
  source 1..25396: mol_type = other DNA
gtttacccgccaatatatcctgtcaaacactgcggccgcacttgaccgcggatggagccggagctgtggtgaggccatcgacgggaggtgggggagaacacagtctcagtgttctttgtgagtccgcaaggtttttagcttttctgtattaattaaggttgctgttggctgtagaatacggtcgtggaagagctgtatcggtagctactacgtaagctattatatactggaagtctggagctcgtcgatctccggtcgtcttcctccatttctcctcgtcttgctttgactgctgctaccatttgcttctgttttctgatgaagcatgccatgtcggccaccagtgtttgtgtggtttttgcagggaatggctttcaagtgctgtgattgaatggccctcgtcgtcctcggctgagctcacatggacgcgtcatgtgagtgagatatatgatcatatgatgagtggggttcgggtgagtgcgtacttgaagtaggatcccgctttcactcattcattcattggcctttaaaccgggaaattttcgcgaggagatggagggaagcaagcagggtgacgagtgcagagtgccgcgagcgctttgtcaaaaggcaccgccgtaggcaaaaaaatcaatggccctgactgactcgatggtagtactactgtagagactagagagggttgctccccatatcttcgtgtgacttttactccagcattgcatttccgtcattgagacgttaattaatagcagctttcgggacagatgactgtggccatgtttcgtcacggccgcttcgtgccagctgggggtactatagtactgtgattttgttagtaaaaactttcattaggccaccattgacgaccgggccttcgcttttgctgcgctaattaaccatttcccggcgaccgaagggaacatgaacatgccccgacacatgagggcatgaggactagtgttctccctgtcgttcgttgacttgactagtgatagtttaaacgctcttcaactggaagagcggttactaccggttcactagctagctgctaatcgagctagttaccctatgaggtgacatgaagcgctcacggttactatgacggttagcttcacgactgttggtggcagtagcgtacgacttagctatagttccggacttacccttaagataacttcgtatagcatacattatacgaagttatgggcccacgcgtgaagagcggttaccagagctggtcacctttgtccaccaagatggaactgtcttcggccagaatggccatctggattcagcaggcctagaaggccatttatcgctatcaactttgtatagaaaagttgggccgaattcgagctcggtacggccagaatggcccggaccgaagcttgcatgcctgcagcccatccctcagccgcctttcactatcttttttgcccgagtcattgtcatgtgaaccttggcatgtataatcggtgaattgcgtcgattttcctcttataggtgggccaatgaatccgtgtgatcgcgtctgattggctagagatatgtttcttccttgttggatgtattttcatacataatcatatgcatacaaatatttcattacactttatagaaatggtcagtaataaaccctatcactatgtctggtgtttcattttatttgcttttaaacgaaaattgacttcctgattcaatatttaaggatcgtcaacggtgtgcagttactaaattctggtttgtaggaactatagtaaactattcaagtcttcacttattgtgcactcacctctcgccacatcaccacagatgttattcacgtcttaaatttgaactacacatcatattgacacaatattttttttaaataagcgattaaaacctagcctctatgtcaacaatggtgtacataaccagcgaagtttagggagtaaaaaacatcgccttacacaaagttcgctttaaaaaataaagagtaaattttactttggaccacccttcaaccaatgtttcactttagaacgagtaattttattattgtcactttggaccaccctcaaatcttttttccatctacatccaatttatcatgtcaaagaaatggtctacatacagctaaggagatttatcgacgaatagtagctagcatactcgaggtcattcatatgcttgagaagagagtcgggatagtccaaaataaaacaaaggtaagattacctggtcaaaagtgaaaacatcagttaaaaggtggtataaagtaaaatatcggtaataaaaggtggcccaaagtgaaatttactcttttctactattataaaaattgaggatgtttttgtcggtactttgatacgtcatttttgtatgaattggtttttaagtttattcgcttttggaaatgcatatctgtatttgagtcgggttttaagttcgtttgcttttgtaaatacagagggatttgtataagaaatatctttaaaaaaacccatatgctaatttgacataatttttgagaaaaatatatattcaggcgaattctcacaatgaacaataataagattaaaatagctttcccccgttgcagcgcatgggtattttttctagtaaaaataaaagataaacttagactcaaaacatttacaaaaacaacccctaaagttcctaaagcccaaagtgctatccacgatccatagcaagcccagcccaacccaacccaacccaacccaccccagtccagccaactggacaatagtctccacacccccccactatcaccgtgagttgtccgcacgcaccgcacgtctcgcagccaaaaaaaaaaaaagaaagaaaaaaaagaaaaagaaaaaacagcaggtgggtccgggtcgtgggggccggaaacgcgaggaggatcgcgagccagcgacgaggccggccctccctccgcttccaaagaaacgccccccatcgccactatatacatacccccccctctcctcccatccccccaaccctaccaccaccaccaccaccacctccacctcctcccccctcgctgccggacgacgagctcctcccccctccccctccgccgccgccgcgccggtaaccaccccgcccctctcctctttctttctccgttttttttttccgtcacggtctcgatctttggccttggtagtttgggtgggcgagaggcggcttcgtgcgcgcccagatcggtgcgcgggaggggcgggatctcgcggctggggctctcgccggcgtggatcaggcccggatctcgcggggaatggggctctcggatgtagatctgcgatccgccgttgttgggggagatgatggggggtttaaaatttccgccatgctaaacaagatcaggaagaggggaaaagggcactatggtttatatttttatatatttctgctgcttcgtcaggcttagatgtgctagatctttctttcttctttttgtgggtagaatttgaatccctcagcattgttcatcggtagtttttcttttcatgatttgtgacaaatgcagcctcgtgcggagcttttttgtaggtagaaggatccgcccatggcggccaatgcgggcggcggtggagcgggaggaggcagcggcagcggcagcgtggctgcgccggcggtgtgccgccccagcggctcgcggtggacgccgacgccggagcagatcaggatgctgaaggagctctactacggctgcggcatccggtcgcccagctcggagcagatccagcgcatcaccgccatgctgcggcagcacggcaagatcgagggcaagaacgtcttctactggttccagaaccacaaggcccgcgagcgccagaagcgccgcctcaccagcctcgacgtcaacgtgcccgccgccggcgcggccgacgccaccaccagccaactcggcgtcctctcgctgtcgtcgccgccgccttcaggcgcggcgcctccctcgcccaccctcggcttctacgccgccggcaatggcggcggatcggctgtgctgctggacacgagttccgactggggcagcagcggcgctgctatggccaccgagacatgcttcctgcaggactacatgggcgtgacggacacgggcagctcgtcgcagtggccacgcttctcgtcgtcggacacgataatggcggcggccgcggcgcgggcggcgacgacgcgggcgcccgagacgctccctctcttcccgacctgcggcgacgacggcggcagcggtagcagcagctacttgccgttctggggtgccgcgtccacaactgccggcgccacttcttccgttgcgatccaacagcaacaccagctgcaggagcagtacagcttttacagcaacagcaacagcacccagctggccggcaccggcaaccaagacgtatcggcaacagcagcagcagccgccgccctggagctgagcctcagctcatggtgctccccttaccctgctgcagggagtatgtgagagcaacgcgagctgccactgctcttcactgatgtctctggaatggaaggaggaggaagtgagaacagatcattcgacaaagcagcattagtccgttgatcggtggaagaccactcgtcagtgttgagttgaatgtttgatcaataaaatacggcaatgctgtaagggttgttttttatgccattgataatacactgtactgttcagttgttgaactctatttcttagccatgccaagtgcttttcttattttgaataacattacagcaaaaagttgaaagacaaaaaaaaaaacccccgaacagagtgctttgggtcccaagcttctttagactgtgttcggcgttccccctaaatttctccccctatatctcactcacttgtcacatcagcgttctctttccccctatatctccacgctctacagcagttccacctatatcaaacctctataccccaccacaacaatattatatactttcatcttcaactaactcatgtaccttccaatttttttctactaataattatttacgtgcacagaaacttagcaaggagagagagagcgggaatttaaatgctcggcgttaggcttttagtccgctaggtggctagaccgaggttaggacgctagttcactaggggcctagtggtgttttaagacgtcacggtcacctgaagaaactatgtgctgtagtatagccgctgcccgctggctagctagctagttgagtcatttagcggcgatgattgagtaataatgtgtcacgcatcaccatgcatgggtggcagtgtcagtgtgagcaatgacctgaatgaacaattgaaatgaaaagaaaaaagtattgttccaaattaaacgttttaaccttttaataggtttatacaataattgatatatgttttctgtatatgtctaatttgttatcatccatttagatatagacaaaaaaaatctaagaactaaaacaaatgctaatttgaaatgaagggagtatatattgggataatgtcgatgagatccctcgtaatatcaccgacatcacacgtgtccagttaatgtatcagtgatacgtgtattcacatttgttgcgcgtaggcgtacccaacaattttgatcgactatcagaaagtcaacggaagcgagtcgacctcgagggggggccccggccgaagcttcggccggggcccatcgataacgagtatcggtccccattgacacatctactcctaacgctaacaacattcttcacttctagtgtatggcatcgacaattggtactttaatcttgggtcttcacttttacaactaaacaacccaaatataaatattatttgagtgggtttggtgttcatcagaacattcccatctttggtaatgctacctagcataaaagtgagctatcacgttgggcagcccattccatgcaatttttaccttcctcaaaaaaaatctttgatatatttatggtataataatttaaacttcacattgatcataattttttcagcaaataagttccataatttggtgtttgcaatatcgaaattgttactcatagggtccagttgatttaatgacattagtgttgttaagttcacatgcttcaaagaattctacatgtctacaatgctgcatttgtctgtaaaatttgggttcttgtaaaaaatacatgtgttgaatatttaccaaaaaaatataatgcgatatgactttgtgtgagcatgtttggacacagttacaagtttacttctaaacttatattatgttttgcttcgtgcaagtacaagtgatttgaatatccaaggccaaagcatgtgtccatcactatatcaaatcaacataccatatatgtatatactcaacaaaaagcacaaataatcacatctatgttataaacacacccccacacaaccaaacattaacattcaataggttgtgctaggacatcattgggatgatgaagtaatattgtattatctatgtattgaccaagcatgagtttaaaattacgatttgatgttttcagttatttatatgatgaacatagttcagaaatatatcgagataaatctcaatcaatatattgattatttctaggaaacacatgccggtatgagggcaccattgtcgagtacatcttaagtgagttaacggatcctctagagtcgacctgcaggcatgcccgcggatatcgatgggccccggccgaagcttcaagtttgtacaaaaaagcaggctccggccagaatctcactgactagctaaacagcggccgcatcgagcagctggcttgtggggaccagacaaaaaaggaatggtgcagaattgttaggcgcacctaccaaaagcatctttgcctttattgcaaagataaagcagattcctctagtacaagtggggaacaaaataacgtggaaaagagctgtcctgacagcccactcactaatgcgtatgacgaacgcagtgacgaccacaaaactcgagcaacgagatcatgagccaatcaaagaggagtgatgtagacctaaagcaataatggagccatgacgtaagggcttacgcccatacgaaataattaaaggctgatgtgacctgtcggtctctcagaacctttactttttatgtttggcgtgtatttttaaatttccacggcaatgacgatgtgaccgtcgacccactaaaacattgctttgtcaaaagctaaaaaagatgatgcccgacagccacttgtgtgaagcatgagaagccggtccctccactaagaaaattagtgaagcatcttccagtggtccctccactcacagctcaatcagtgagcaacaggacgaaggaaatgacgtaagccatgacgtctaatcccagggcccggtgaccaatcgaattagcttggcgcgtggaccgaagcttgcatgcctgcagtgcagcgtgacccggtcgtgcccctctctagagataatgagcattgcatgtctaagttataaaaaattaccacatattttttttgtcacacttgtttgaagtgcagtttatctatctttatacatatatttaaactttactctacgaataatataatctatagtactacaataatatcagtgttttagagaatcatataaatgaacagttagacatggtctaaaggacaattgagtattttgacaacaggactctacagttttatctttttagtgtgcatgtgttctcctttttttttgcaaatagcttcacctatataatacttcatccattttattagtacatccatttagggtttagggttaatggtttttatagactaatttttttagtacatctattttattctattttagcctctaaattaagaaaactaaaactctattttagtttttttatttaataatttagatataaaatagaataaaataaagtgactaaaaattaaacaaataccctttaagaaattaaaaaaactaaggaaacatttttcttgtttcgagtagataatgccagcctgttaaacgccgtcgacgagtctaacggacaccaaccagcgaaccagcagcgtcgcgtcgggccaagcgaagcagacggcacggcatctctgtcgctgcctctggacccctctcgagagttccgctccaccgttggacttgctccgctgtcggcatccagaaattgcgtggcggagcggcagacgtgagccggcacggcaggcggcctcctcctcctctcacggcaccggcagctacgggggattcctttcccaccgctccttcgctttcccttcctcgcccgccgtaataaatagacaccccctccacaccctctttccccaacctcgtgttgttcggagcgcacacacacacaaccagatctcccccaaatccacccgtcggcacctccgcttcaaggtacgccgctcgtcctcccccccccccctctctaccttctctagatcggcgttccggtccatgcatggttagggcccggtagttctacttctgttcatgtttgtgttagatccgtgtttgtgttagatccgtgctgctagcgttcgtacacggatgcgacctgtacgtcagacacgttctgattgctaacttgccagtgtttctctttggggaatcctgggatggctctagccgttccgcagacgggatcgatttcatgattttttttgtttcgttgcatagggtttggtttgcccttttcctttatttcaatatatgccgtgcacttgtttgtcgggtcatcttttcatgcttttttttgtcttggttgtgatgatgtggtctggttgggcggtcgttctagatcggagtagaattctgtttcaaactacctggtggatttattaattttggatctgtatgtgtgtgccatacatattcatagttacgaattgaagatgatggatggaaatatcgatctaggataggtatacatgttgatgcgggttttactgatgcatatacagagatgctttttgttcgcttggttgtgatgatgtggtgtggttgggcggtcgttcattcgttctagatcggagtagaatactgtttcaaactacctggtgtatttattaattttggaactgtatgtgtgtgtcatacatcttcatagttacgagtttaagatggatggaaatatcgatctaggataggtatacatgttgatgtgggttttactgatgcatatacatgatggcatatgcagcatctattcatatgctctaaccttgagtacctatctattataataaacaagtatgttttataattattttgatcttgatatacttggatgatggcatatgcagcagctatatgtggatttttttagcactgccttcatacgctatttatttgcttggtactgtttcttttgtcgatgctcaccctgttgtttggtgttacttctgcaggtcgactttaacttagcctaggatccatggacacgttcgggcagcgcacgtcgatttaccgtggcgtgacaaggcatagatggactgggagatatgaggcacatctttgggataacagttgcagaagggaagggcaaactcgtaagggtcgtcaagtctatttaggtggctatgataaagaggagaaagctgctagggcttatgatcttgctgctctgaagtactggggtgccacaacaacaacaaattttccagtgagtaactacgaaaaggagctcgaggacatgaagcacatgacaaggcaggagtttgtagcgtctctgagaaggaagagcagtggtttctccagaggtgcatccatttacaggggagtgactaggcatcaccaacatggaagatggcaagcacggattggacgagttgcagggaacaaggatctttacttgggcaccttcagcacccaggaggaggcagcggaggcgtacgacatcgcggcgatcaagttccgcggcctcaacgccgtcaccaacttcgacatgagccgctacgacgtgaagagcatcctggacagcagcgccctccccatcggcagcgccgccaagcgcctcaaggaggccgaggccgcagcgtccgcgcagcaccaccacgccggcgtggtgagctacgacgtcggccgcatcgcctcgcagctcggcgacggcggagccctggcggcggcgtacggcgcgcactaccacggcgccgcctggccgaccatcgcgttccagccgggcgccgccagcacaggcctgtaccacccgtacgcgcagcagccaatgcgcggcggcgggtggtgcaagcaggagcaggaccacgcggtgatcgcggccgcgcacagcctgcaggacctccaccacctgaacctgggcgcggccggcgcgcacgactttttctcggcagggcagcaggccgccgccgctgcgatgcacggcctgggtagcatcgacagtgcgtcgctcgagcacagcaccggctccaactccgtcgtctacaacggcggggtcggcgacagcaacggcgccagcgccgtcggcggcagtggcggtggctacatgatgccgatgagcgctgccggagcaaccactacatcggcaatggtgagccacgagcaggtgcatgcacgggcctacgacgaagccaagcaggctgctcagatggggtacgagagctacctggtgaacgcggagaacaatggtggcggaggtggaggcggctcgggtggcggaggctccggaggcggtggctcgacgtgcgccaaggacatccaaaaagcagccgcggaggcggcactcgcctttcaggacgagacctgcgacaccaccaccaccaaccacggcctcgacatggaggagaccatggtcgaagccatctacacccccgagcagagcgagggcgccttctacatggacgaagagacaatgttcggcatgccaaccctcctcgacaacatggccgaaggcatgctgctgccgcccccgagcgtccagtggaaccacaactacgacggcgaaggcgacggggatgtgtccctgtggagctactagggtacctgacatcttatagtctgcaacctctcgtgtctgaattcctatctttatcaagtgttattgcttccacgactataggacagctttcgtcgaaagcttttgctcatgtgatctcgaaggattcatctagtctgatttttcgtgacttgtatcggttttattggattcatccaacatatatcaataaaaaatgagttgtgtttcctttcttcctagttcagttaaaattatttccctcctgcgcttgtgctgtaattgtctgtgtacctgttgtttgtgactgtgttagttcccttggatatgatttcgtatttgatatgtacatggagatagcttagcttcattattggagtatgaagttagtatgacatagtcactctcctggaaaattgacactgcaaaccatatttttattctgaaccacaaatcctagtcagtccgctggcatatgccgtccgtttgctgaatccagaacgtgggtttggagatgtacggctgagatgcctctatgcgaaggggatttcgtggtgaaacgagatgggagtagagcaacgcccgtggaagatgcttcaaacttccacacttttgagcaacgatcggcagtagtaaggtagacgatttcaagatcaaagcatatgaagataaacaacatcaacaacaaaatttgttggggttctatagagagaaacagagctacatacatacactgttttgtatctaccatctgagatgatgaaaagatgaaaaactaaagaatgccccggcgccaacgccaggacacgccgcgcgcgcgtcacccgagccatctcttgacccagccggcgctgtatatttacacacgttgcagcatcgatcaccacctgttcgatcgcgtcgccgtcaccggcgcgccgcgacttattgaactagtctagggcgcggctaacaacctagcttagattgccttgtctaaacccttaggctaacgcgccactctagaaggccgatctcccccgaacgcgccagatccgatatcgatgggccctggccgaagcttggtcacccggtccgggcctagaaggccgatctcccgggcacccagctttcttgtacaaagtggccgttaacggatcggccagaatggcccggaccgggttaccccgcggttcaaagccaatgactgttgttaggtccagtttctaaggacgaatcatccaatcactggttctttctgaacaaaacaaagagctatagagttacgttactgtagccgagacagagcctgcaatctggttatgccacatactaggttctttcttaaagttgactcactctatcctaagttctacttacaaggagctacaacaaattggtcataaccggagagcgttcaaggaggtaatatcccatcttactctgtagcaaggctacaaaaggagagctaaagaactaggctacaaaaagagagctaaagaactaactatctagcaagactacagagctatagtgtagagatttcataaccggtgagcgttcaaggatactttgaagagaagaggtaatatctcaactagcaagactacaaaaaaatggagatataaaactaactgtctaacaagactacagagctatagtagagatagatacgttcgacacttaagcatgagaattcgagctcggtaccctggttcacaaactcaatacaacacacagtggagtagggtattacgctccggcggcccgaaccactctaaatccttgtgtcctcgtgtgctcttccaccattaatgactgtaattgcagggacacgaagagttgtagcgcttttgccaacaagatccgctatatgctagtagagtggaacctgcacagcaacaagcatccaataatctgagaataagaattatgtgtggtgatggttctcatctctgcaactcgccattttcgcgagagaaccaaatccaagttggtgaagatcatgatttgggctcatgggctggcatagtagctattacctttgcaattgtggttcgaatctatccgatattctccttttcagggagagctaatgcttatgcttattgggtattttggtttgacactgcttcacgcccaaaaaaaggcaactatgtctgagttggatatggcccaaaaaaaggcagctatgtctgagttggatatggaagtcttctttcgtttagggtgaagtaagaccaagctcatgagcttattatcttaggtcggaacaaattagttgataggcatggcacatttatcaaattataatgattttaacagaaaagcaacacctctttttcagcagcaccagctttgcaagctgcaattgacactccaagcatagtatttgctccaaactcagcctgcatttcgcacaatatcatatctatttccatttggataaaatatattttccagaaatatgggaacagaatcaagatacagaaaaaagttgtggtagtagtggtaagtggaaacacaagtacagtgaaaagatagcattatttctgaacagtcaaattaaccgaaataagtagtatcacatactgcccctaaattgactacacccaatgtaaagaattgcttgagcatattgagccatcagttgtttgtttgtgtaacggatttgacaatgcagagttcaggagcaaaaaaccgcaaaggagagaaagagggaaaggatctcctagtatcccaccttgtggcgcgccctgtcaagtgcatgatggcctggtcgatctgcgtctgctgctgcggttccatcccaacgagtgcctccgacaccttgtcgttgatcacccgcaccgcgtaggcgacccccctggcgaggaacttccgcctctcggaggccccggccgcgtcggcggcggcgccctcgagcgcgcccacgctagccgtagatgctcggtgcacggccttgttggtgtgcaactcgacctcaacggccggtgcgctacgcccgtcaaggatctggcgcgcccgcaccctcgtgatcacggtgggcgcctcccgcctcatgtggccgacgatgaaaagcgccgggttaggggccttggcgcgcaccgccgtattcagggcctcctcgctcttgcgcgagagcaggtgcttccccaggtactcctgcactgacaaggctgccacagcggtggaatttgtcctcacgacttcgccacgtcgtcctcacctccctggcttcccacgactccgccgtatcgaggtgctcggtgggtcgtcttaatccgaagtccgaactaggaagacgagacagagaggtctgaggaatgggcctcgtttgatgttgagctgaattatttttccagcataagcccaggtcttggtccatgaacaaaattactagaaacccagcccagtactacgatctaaaagagggactgccactggatagctctctctagcattctccacgctccaatacagcggcgtcgtgtctatccgggtctatccgcgaacacgtgagaactctccagaaactgctttctcctccacttcatctctctcgctttccctctataaaaagaccccttctaggaattgagggagacagcaagcaccaagcagcgatccgaagctcaatcaattcactcaaacctcttccccaaatcttcgattagatcttcgttgacaagaagactagaaccgaacctgacatgtccaacctgctcacggttcaccagaaccttccggctcttccagtggacgcgacgtccgatgaagtcaggaagaacctcatggacatgttccgcgacaggcaagcgttcagcgagcacacctggaagatgctgctctccgtctgccgctcctgggctgcatggtgcaagctgaacaacaggaagtggttccccgctgagcccgaggacgtgagggattaccttctgtacctgcaagcgcgaggtttgtttctgcttctacctttgatatatatataataattatcattaattagtagtaatataatatttcaaatatttttttcaaaataaaagaatgtagtatatagcaattgcttttctgtagtttataagtgtgtatattttaatttataacttttctaatatatgaccaaaacatggtgatgcctaggtctggcagtgaagaccatccagcaacaccttggacaactgaacatgcttcacaggcgctccggcctcccgcgccccagcgactcgaacgccgtgagcctcgtcatgcgccgcatcaggaaggaaaacgtcgatgccggcgaaagggcaaagcaggccctcgcgttcgagaggaccgatttcgaccaggtccgcagcctgatggagaacagcgacaggtgccaggacattaggaacctggcgttcctcggaattgcatacaacacgctcctcaggatcgcggaaattgcccgcattcgcgtgaaggacattagccgcaccgacggcggcaggatgcttatccacattggcaggaccaagacgctcgtttccaccgcaggcgtcgaaaaggccctcagcctcggagtgaccaagctcgtcgaacgctggatctccgtgtccggcgtcgcggacgacccaaacaactacctcttctgccgcgtccgcaagaacggggtggctgcccctagcgccaccagccaactcagcacgagggccttggaaggtattttcgaggccacccaccgcctgatctacggcgcgaaggatgacagcggtcaacgctacctcgcatggtccgggcactccgcccgcgttggagctgctagggacatggcccgcgccggtgtttccatccccgaaatcatgcaggcgggtggatggacgaacgtgaacattgtcatgaactacattcgcaaccttgacagcgagacgggcgcaatggttcgcctcctggaagatggtgactgaggtacccaacctagacttgtccatcttctggattggccaacttaattaatgtatgaaataaaaggatgcacacatagtgacatgctaatcactataatgtgggcatcaaagttgtgtgttatgtgtaattactagttatctgaataaaagagaaagagatcatccatatttcttatcctaaatgaatgtcacgtgtctttataattctttgatgaaccagatgcatttcattaaccaaatccatatacatataaatattaatcatatataattaatatcaattgggttagcaaaacaaatctagtctaggtgtgttttgcgatccgatatcgaattggccacggtaccagctgctgctgttctagggttcacaagtctgcctatttgtcttccccaatggagctatggttgtctggtctggtccttggtcgtgtcccgtttcattgtgtactatttacctgtaatgtgtatccttaagtctggtttgatggtgtctgaaacgttttgctgtggtagagcagcatggaagaactataatgaataagtgatccctaatcattgtgtccaaattttgcttctgctatacccttttgtgctgtttcttatgttttgcttaaaaatttgatctgacaaacaaatttgtctaaattatgctcttgttctgactgtgtactgtacacatttgtattgctaccggtttggcacatagttttctctttgattgcagatcaaacccttctgattgcagattgcttggctatggctgatgtgctcactgttcttctttagcttgtatattgctgatggtggcttggctacggctgaaaaagttgctgctgcgccgacttggcaactgttgctccagtaatgctttgtcctctcttcctagccgccgacttggcacttggcagctgttgctcctgtaatgcgttgttatctcttatctcttgagatgtactatgattttgaggctgtttgacttgtgccagattgccagtgctgatgctatattatctcaggtttttatgctagtatatgttttactgtgtgctgcctgtgtcgagttacgtaatctattgaaccgctatgcgtgttgatgccctgttgttgcttgccagattgatgcccctgttgcttgcagcttgcaagctgtagtgaaatcctaaaattccaaaccaaatctattctgaacttttgaagatctgtgatgtccggaagaaaagattcaaacagataaacgggactctccagaatctataaaataaatgatcgacaaacgctttgctttggtaggcttcaagcttggtcacccggtccgggcctagaaggccagcttcggccgccccgggcaactttattatacaaagttgatagataaatcagatatctggttcctaaggacccggcggaccgattaaactgattcggtccgacgcgttacctaataacttcgtatagcatacattatacgaagttattagctaactaactagtaagcgtacacctgagcggttaccgaattcctgcccttaaggccaattgttcaagattcattcaacaattgaaacatctcccatgattaaatcagtataaggttgctatggtcttgcttgacaaagtttttttttgagggaatttcaactaaatttttgagtgaaactatcaaatactgattttaaaaaatttttataaaaggaagcgcagagataaaaggccatctatgctacaaaagtacccaaaaatgtaatcctaaagtatgaattgcattttttttttgtttggacgaaaggaaaggagtattaccacaagaatgatatcatcttcatatttagatcttttttgggtaaagcttgagattctctaaatatagagaaatcagaagaaaaaaaaaccgtgttttggtggttttgatttctagcctccacaataactttgacggcgtcgacaagtctaacggacaccaagcagcgaaccaccagcgccgagccaagcgaagcagacggccgagacgttgacaccttcggcgcggcatctctcgagagttccgctccggcgctccacctccaccgctggcggtttcttattccgttccgttccgcctcctgctctgctcctctccacaccacacggcacgaaaccgttacggcaccggcagcacccagcacgggagaggggattcctttcccaccgttccttccctttccgccccgccgctataaatagccagccccatccccagcttttttccccaatctcatctcctctctcctgttgttcggagcacacgcacaatccgatcgatccccaaatccccttcgtctctcctcgcgagcctcgtggatcccagcttcaaggtacggcgatcgatcatcccccctccttctctctaccttcttttctctagactacatcggatggcgatccatggttagggcctgctagtttcccttcctgttttgtcgatggctgcgaggcacaatagatctgatggcgttatgacggctaacttgtcatgttgttgcgatttatagtccctttaggagatcagtttaatttctcggatggttcgagatcggtggtccatggttagtaccctaagatccgcgctgttagggttcgtagatggaggcgacctgttctgattgttaacttgtcagtacctgggaaatcctgggatggttctagctcgtccgcagatgagatcgatttcatgatcctctgtatcttgtttcgttgcctaggttccgtctaatctatccgtggtatgatgtagatgttttgatcgtgctaactacgtcttgtaaagttaattgtcaggtcataatttttagcatgcctttttttttgtttggttttgtctaattgggctgtcgttctagatcagagtagaagactgttccaaactacctgctggatttattgaacttggatctgtatgtgtgtcacatatcttcataaattcatgattaagatggattgaaatatcttttatctttttggtatggatagttctatatgttggtgtggctttgttagatgtatacatgcttagatacatgaagcaacgtgctgctactgtttagtaattgctgttcatttgtctaataaacagataaggatatgtatttatgttgctgttggttttgctggtactttgttggatacaaatgcttcaatacagaaaacagcatgctgctacgatttaccatttatctaatcttatcatatgtctaatctaataaacaaacatgcttttaaattatcttcatatgcttggatgatggcatacacagcggctatgtgtggttttttaaatacccagcatcatgggcatgcatgacactgctttaatatgctttttatttgcttgagactgtttcttttgtttatactgaccctttagttcggtgactcttctgcaggtcgactttaacttagcctaggatccatggcccagtccaagcacggcctgaccaaggagatgaccatgaagtaccgcatggagggctgcgtggacggccacaagttcgtgatcaccggcgagggcatcggctaccccttcaagggcaagcaggccatcaacctgtgcgtggtggagggcggccccttgcccttcgccgaggacatcttgtccgccgccttcatgtacggcaaccgcgtgttcaccgagtacccccaggacatcgtcgactacttcaagaactcctgccccgccggctacacctgggaccgctccttcctgttcgaggacggcgccgtgtgcatctgcaacgccgacatcaccgtgagcgtggaggagaactgcatgtaccacgagtccaagttctacggcgtgaacttccccgccgacggccccgtgatgaagaagatgaccgacaactgggagccctcctgcgagaagatcatccccgtgcccaagcagggcatcttgaagggcgacgtgagcatgtacctgctgctgaaggacggtggccgcttgcgctgccagttcgacaccgtgtacaaggccaagtccgtgccccgcaagatgcccgactggcacttcatccagcacaagctgacccgcgaggaccgcagcgacgccaagaaccagaagtggcacctgaccgagcacgccatcgcctccggctccgccttgccctccggactcagatctcgatagggtaccaatggccagttaacagatccagctgctgctgttctagggttcacaagtctgcctatttgtcttccccaatggagctatggttgtctggtctggtccttggtcgtgtcccgtttcattgtgtactatttacctgtaatgtgtatccttaagtctggtttgatggtgtctgaaacgttttgctgtggtagagcagcatggaagaactataatgaataagtgatccctaatcattgtgtccaaattttgcttctgctatacccttttgtgctgtttcttatgttttgcttaaaaatttgatctgacaaacaaatttgtctaaattatgctcttgttctgactgtgtactgtacacatttgtattgctaccggtttggcacatagttttctctttgattgcagatcaaacccttctgattgcagattgcttggctatggctgatgtgctcactgttcttctttagcttgtatattgctgatggtggcttggctacggctgaaaaagttgctgctgcgccgacttggcaactgttgctccagtaatgctttgtcctctcttcctagccgccgacttggcacttggcagctgttgctcctgtaatgcgttgttatctcttatctcttgagatgtactatgattttgaggctgtttgacttgtgccagattgccagtgctgatgctatattatctcaggtttttatgctagtatatgttttactgtgtgctgcctgtgtcgagttacgtaatctattgaaccgctatgcgtgttgatgccctgttgttgcttgccagattgatgcccctgttgcttgcagcttgcaagctgtagtgaaatcctaaaattcgaaaccaaatctattctgaacttttgaagatctgtgatgtccggaagaaaagattcaaacagataaacgggactctccagaatctataaaataaatgatcgacaaacgctttgctttggtaggcttcctagttagttagcggaccgaagcttcggtccgggcctgcggccgcagatatcagaacctgcgtctggacgcacaagtcatagcattatcggctaaaatttcttaatttctaaattagtcatatcggctaagaaagtggggagcactatcatttcgtagaacaagaacaaggtatcatatatatatatatatataatatttaaactttgttaagtggaatcaaagtgctagtattaatggagtttcatgtgcattaaattttatgtcacatcagcaattttgttgacttggcaaggtcatttagggtgtgtttggaagacaggggctattaggagtattaaacatagtctaattacaaaactaattgcacaaccgctaagctgaatcgcgagatggatctattaagcttaattagtccatgatttgacaatgtggtgctacaataaccatttgctaatgatggattacttaggtttaatagattcgtctcgtgatttagcctatgggttctgctattaattttgtaattagctcatatttagttcttataattagtatccgaacatccaatgtgacatgctaaagtttaaccctggtatccaaatgaagtcttatgagagtttcatcactccggtggtatatgtacttaggctccgttttcttccaccgacttatttttagcacccgtcacattgaatgtttagatactaattagaagtattaaacgtagactatttacaaaatccattacataagacgaatctaaacggcgagacgaatctattaaacctaattagtccatgatttgacaatgtgttgctacagtaaacatttgctaatgatggattaattaggcttaatagattcgtctcgccgtttagcctccacttatgtaatgggttttctaaacaatctacgtttaatactcctaattagtatctaaatattcaatgtgacacgtgctaaaaataagtcagtggaaggaagagaacgtccccttagttttccatcttattaattgtacgatgaaactgtgcagccagatgattgacaatcgcaatacttcaactagtgggccatgcacatcagcgacgtgtaacgtcgtgagttgctgttcccgtagagaaatatcaactggtgggccacgcacatcagcgtcgtgtaacgtggacggaggagccccgtgacggcgtcgacatcgaacggccaccaaccacggaaccacccgtccccacctctcggaagctccgctccacggcgtcgacatctaacggctaccagcaggcgtacgggttggagtggactccttgcctctttgcgctggcggcttccggaaattgcgtggcggagacgaggcgggctcgtctcacacggcacggaagacgtcacgggttccttccccacctctcctcttccccaccgccataaatagccgaccccctcgcctttctccccaatctcatctcgtctcgtgttgttcggagcacaccacccgccccaaatcgttcttcccgcaagcctcggcgatccttcacccgcttcaaggtacggcgatcgtcttcctcctctagatcggcgtgatctgcaagtagttgatttggtagatggttaggatctgtgcactgaagaaatcatgttagatccgcgatgtttctgttcgtagatggctgggaggtggaatttttgtgtagatctgatatgttctcctgtttatcttgtcacgctcctgcgatttgtggggattttaggtcgttgatctgggaatcgtggggttgcttctaggctgttcgtagatgaggtcgttctcacggtttactggatcattgcctagtagatcagctcgggctttcgtctttgtatatggtgcccatacttgcatctatgatctggttccgtggtgttacctaggtttctgcgcctgattcgtccgatcgattttgttagcatgtggtaaacgtttggtcatggtctgatttagattagagtcgaataggatgatctcgatctagctcttgggattaatatgcatgtgtcaccaatctgttccgtggttaagatgatgaatctatgcttagttaatgggtgtagatatatatgctgctgttcctcaatgatgccgtagcttttacctgagcagcatggatcgtcctgttacttaggtagatgcacatgcttatagatcaagatatgtactgctactgttggaattctttagtatacctgatgatcatccatgctcttgttacttgttttggtatacttggatgatggcatgctgctgctttttgttgatttgagcccatccatatctgcatatgtcacatgattaagatgattacgctgtttctgtatgatgccatagcttttatgtgagcaacatgcatcctcctggttatatgcattaatagatggaagatatctattgctacaatttgatgattattttgtacatacgatgatcaagcatgctcttcatactttgttgatatacttggataatgaaatgctgctgcacgttcattctatagcactaatgatgtgatgaacacgcacgacctgtttgtggcatctgtttgaatgtgttgttgctgttcactagagactgttttattaacctactgctagatacttacccttctgtctgtttattcttttgcagccagaatagcggatccgcccatggtcgaacaggacggcctgcatgcaggatcaccagcggcctgggtcgaaagactcttcggctacgactgggcacaacagaccatcgggtgtagcgacgcagctgttttcaggctgtccgcacagggcagacccgttttgttcgtcaaaacagacctgtctggcgcgctcaacgaactgcaagacgaggccgcaagactgagctggcttgctaccacaggcgttccttgtgctgcagtcctcgacgtcgttactgaggctggaagagactggctgctcctgggtgaagtcccaggacaggaccttttgtccagccatctggcacctgccgaaaaggtcagcatcatggcagacgccatgagaaggctgcacacactcgaccctgcaacatgccccttcgatcaccaggcaaaacacaggatcgagcgcgcaagaacgcgcatggaggctggtttggtcgaccaagatgacctcgacgaggaacaccaaggactggctcctgctgaactcttcgccagactcaaggcgagaatgccagacggtgacgacctggtcgtcacacacggcgacgcttgtctcccaaacataatggtcgagaacggacgcttcagcggtttcatcgactgcggtagactcggagtcgctgacagataccaggacatcgccctggcaacacgcgacatcgcagaggaactcggaggcgaatgggctgacaggtttctcgtgctctacggtatcgctgctccagacagccagaggatcgcattctacaggctcctcgacgagttcttttagttcgaacggtacccggggatcctctagtgccgtgggtcgtttaagctgccgctgtacctgtgtcgtctggtgccttctggtgtacctgggaggttgtcgtctatcaagtatctgtggttggtgtcatgagtcagtgagtcccaatactgttcgtgtcctgtgtgcattatacccaaaactgttatgggcaaatcatgaataagcttgatgttcgaacttaaaagtctctgctcaatatggtattatggttgtttttgttcgtctcctaatatttgcctgggatcaaattttattggctggtgttcatttgacctccatgttcttgctaggctccattttttactctacagccataatatgtttgattgtttggtttgttctttgttgtacacctggttctgtcgagcttagttttcgacactggcttacagcttaacatgttgctattttattgggttctgattgctattttattgggttctgattgctagtttttgctgaatccaaaaaccatgttatttatttaagcgatccaggttattattatgatggtggctaagtttttttttttccaagggtaaattttctggattctccagtgtttctgtggccgaattcaatcactagagtcgacctgcatgattccgatgacttcgtaggttcctagctcaagccgctcgtgtccaagcgtcacttacgattagctaatgattacggcatctaggaccgactagctagctagctaagagctcggtaccgagctcgaattcattccgattaatcgtggcctcttgctcttcaggatgaagagctatgtttaaacgtgcaagcgctactagacaattcagtacattaaaaacgtccgcaatgtgttattaagttgtctaagcgtcaatttgtttacaccacaatatatcctgcca

SEQ ID NO: 171 - DNA, 25243 bp, synthetic construct
  source 1..25243: mol_type = other DNA
gtttacccgccaatatatcctgtcaaacactgcggccgcacttgaccgcggatggagccggagctgtggtgaggccatcgacgggaggtgggggagaacacagtctcagtgttctttgtgagtccgcaaggtttttagcttttctgtattaattaaggttgctgttggctgtagaatacggtcgtggaagagctgtatcggtagctactacgtaagctattatatactggaagtctggagctcgtcgatctccggtcgtcttcctccatttctcctcgtcttgctttgactgctgctaccatttgcttctgttttctgatgaagcatgccatgtcggccaccagtgtttgtgtggtttttgcagggaatggctttcaagtgctgtgattgaatggccctcgtcgtcctcggctgagctcacatggacgcgtcatgtgagtgagatatatgatcatatgatgagtggggttcgggtgagtgcgtacttgaagtaggatcccgctttcactcattcattcattggcctttaaaccgggaaattttcgcgaggagatggagggaagcaagcagggtgacgagtgcagagtgccgcgagcgctttgtcaaaaggcaccgccgtaggcaaaaaaatcaatggccctgactgactcgatggtagtactactgtagagactagagagggttgctccccatatcttcgtgtgacttttactccagcattgcatttccgtcattgagacgttaattaatagcagctttcgggacagatgactgtggccatgtttcgtcacggccgcttcgtgccagctgggggtactatagtactgtgattttgttagtaaaaactttcattaggccaccattgacgaccgggccttcgcttttgctgcgctaattaaccatttcccggcgaccgaagggaacatgaacatgccccgacacatgagggcatgaggactagtgttctccctgtcgttcgttgacttgactagtgatagtttaaacgctcttcaactggaagagcggttactaccggttcactagctagctgctaatcgagctagttaccctatgaggtgacatgaagcgctcacggttactatgacggttagcttcacgactgttggtggcagtagcgtacgacttagctatagttccggacttacccttaagataacttcgtatagcatacattatacgaagttatgggcccacgcgtgaagagcggttaccagagctggtcacctttgtccaccaagatggaactgtcttcggccagaatggccatctggattcagcaggcctagaaggccatttatcgctatcaactttgtatagaaaagttgggccgaattcgagctcggtacggccagaatggcccggaccgaagcttgcatgcctgcagcccgtgcagcgtgacccggtcgtgcccctctctagagataatgagcattgcatgtctaagttataaaaaattaccacatattttttttgtcacacttgtttgaagtgcagtttatctatctttatacatatatttaaactttactctacgaataatataatctatagtactacaataatatcagtgttttagagaatcatataaatgaacagttagacatggtctaaaggacaattgagtattttgacaacaggactctacagttttatctttttagtgtgcatgtgttctcctttttttttgcaaatagcttcacctatataatacttcatccattttattagtacatccatttagggtttagggttaatggtttttatagactaatttttttagtacatctattttattctattttagcctctaaattaagaaaactaaaactctattttagtttttttatttaataatttagatataaaatagaataaaataaagtgactaaaaattaaacaaataccctttaagaaattaaaaaaactaaggaaacatttttcttgtttcgagtagataatgccagcctgttaaacgccgtcgacgagtctaacggacaccaaccagcgaaccagcagcgtcgcgtcgggccaagcgaagcagacggcacggcatctctgtcgctgcctctggacccctctcgagagttccgctccaccgttggacttgctccgctgtcggcatccagaaattgcgtggcggagcggcagacgtgagccggcacggcaggcggcctcctcctcctctcacggcaccggcagctacgggggattcctttcccaccgctccttcgctttcccttcctcgcccgccgtaataaatagacaccccctccacaccctctttccccaacctcgtgttgttcggagcgcacacacacacaaccagatctcccccaaatccacccgtcggcacctccgcttcaaggtacgccgctcgtcctcccccccccccctctctaccttctctagatcggcgttccggtccatgcatggttagggcccggtagttctacttctgttcatgtttgtgttagatccgtgtttgtgttagatccgtgctgctagcgttcgtacacggatgcgacctgtacgtcagacacgttctgattgctaacttgccagtgtttctctttggggaatcctgggatggctctagccgttccgcagacgggatcgatttcatgattttttttgtttcgttgcatagggtttggtttgcccttttcctttatttcaatatatgccgtgcacttgtttgtcgggtcatcttttcatgcttttttttgtcttggttgtgatgatgtggtctggttgggcggtcgttctagatcggagtagaattctgtttcaaactacctggtggatttattaattttggatctgtatgtgtgtgccatacatattcatagttacgaattgaagatgatggatggaaatatcgatctaggataggtatacatgttgatgcgggttttactgatgcatatacagagatgctttttgttcgcttggttgtgatgatgtggtgtggttgggcggtcgttcattcgttctagatcggagtagaatactgtttcaaactacctggtgtatttattaattttggaactgtatgtgtgtgtcatacatcttcatagttacgagtttaagatggatggaaatatcgatctaggataggtatacatgttgatgtgggttttactgatgcatatacatgatggcatatgcagcatctattcatatgctctaaccttgagtacctatctattataataaacaagtatgttttataattattttgatcttgatatacttggatgatggcatatgcagcagctatatgtggatttttttagcactgccttcatacgctatttatttgcttggtactgtttcttttgtcgatgctcaccctgttgtttggtgttacttctgcaggtagaaggatccgcccatggcggccaatgcgggcggcggtggagcgggaggaggcagcggcagcggcagcgtggctgcgccggcggtgtgccgccccagcggctcgcggtggacgccgacgccggagcagatcaggatgctgaaggagctctactacggctgcggcatccggtcgcccagctcggagcagatccagcgcatcaccgccatgctgcggcagcacggcaagatcgagggcaagaacgtcttctactggttccagaaccacaaggcccgcgagcgccagaagcgccgcctcaccagcctcgacgtcaacgtgcccgccgccggcgcggccgacgccaccaccagccaactcggcgtcctctcgctgtcgtcgccgccgccttcaggcgcggcgcctccctcgcccaccctcggcttctacgccgccggcaatggcggcggatcggctgtgctgctggacacgagttccgactggggcagcagcggcgctgctatggccaccgagacatgcttcctgcaggactacatgggcgtgacggacacgggcagctcgtcgcagtggccacgcttctcgtcgtcggacacgataatggcggcggccgcggcgcgggcggcgacgacgcgggcgcccgagacgctccctctcttcccgacctgcggcgacgacggcggcagcggtagcagcagctacttgccgttctggggtgccgcgtccacaactgccggcgccacttcttccgttgcgatccaacagcaacaccagctgcaggagcagtacagcttttacagcaacagcaacagcacccagctggccggcaccggcaaccaagacgtatcggcaacagcagcagcagccgccgccctggagctgagcctcagctcatggtgctccccttaccctgctgcagggagtatgtgagagcaacgcgagctgccactgctcttcactgatgtctctggaatggaaggaggaggaagtgagaacagatcattcgacaaagcagcattagtccgttgatcggtggaagaccactcgtcagtgttgagttgaatgtttgatcaataaaatacggcaatgctgtaagggttgttttttatgccattgataatacactgtactgttcagttgttgaactctatttcttagccatgccaagtgcttttcttattttgaataacattacagcaaaaagttgaaagacaaaaaaaaaaacccccgaacagagtgctttgggtcccaagcttctttagactgtgttcggcgttccccctaaatttctccccctatatctcactcacttgtcacatcagcgttctctttccccctatatctccacgctctacagcagttccacctatatcaaacctctataccccaccacaacaatattatatactttcatcttcaactaactcatgtaccttccaatttttttctactaataattatttacgtgcacagaaacttagcaaggagagagagagcgggaatttaaatgctcggcgttaggcttttagtccgctaggtggctagaccgaggttaggacgctagttcactaggggcctagtggtgttttaagacgtcacggtcacctgaagaaactatgtgctgtagtatagccgctgcccgctggctagctagctagttgagtcatttagcggcgatgattgagtaataatgtgtcacgcatcaccatgcatgggtggcagtgtcagtgtgagcaatgacctgaatgaacaattgaaatgaaaagaaaaaagtattgttccaaattaaacgttttaaccttttaataggtttatacaataattgatatatgttttctgtatatgtctaatttgttatcatccatttagatatagacaaaaaaaatctaagaactaaaacaaatgctaatttgaaatgaagggagtatatattgggataatgtcgatgagatccctcgtaatatcaccgacatcacacgtgtccagttaatgtatcagtgatacgtgtattcacatttgttgcgcgtaggcgtacccaacaattttgatcgactatcagaaagtcaacggaagcgagtcgacctcgagggggggccccggccgaagcttcggccggggcccatcgataacgagtatcggtccccattgacacatctactcctaacgctaacaacattcttcacttctagtgtatggcatcgacaattggtactttaatcttgggtcttcacttttacaactaaacaacccaaatataaatattatttgagtgggtttggtgttcatcagaacattcccatctttggtaatgctacctagcataaaagtgagctatcacgttgggcagcccattccatgcaatttttaccttcctcaaaaaaaatctttgatatatttatggtataataatttaaacttcacattgatcataattttttcagcaaataagttccataatttggtgtttgcaatatcgaaattgttactcatagggtccagttgatttaatgacattagtgttgttaagttcacatgcttcaaagaattctacatgtctacaatgctgcatttgtctgtaaaatttgggttcttgtaaaaaatacatgtgttgaatatttaccaaaaaaatataatgcgatatgactttgtgtgagcatgtttggacacagttacaagtttacttctaaacttatattatgttttgcttcgtgcaagtacaagtgatttgaatatccaaggccaaagcatgtgtccatcactatatcaaatcaacataccatatatgtatatactcaacaaaaagcacaaataatcacatctatgttataaacacacccccacacaaccaaacattaacattcaataggttgtgctaggacatcattgggatgatgaagtaatattgtattatctatgtattgaccaagcatgagtttaaaattacgatttgatgttttcagttatttatatgatgaacatagttcagaaatatatcgagataaatctcaatcaatatattgattatttctaggaaacacatgccggtatgagggcaccattgtcgagtacatcttaagtgagttaacggatcctctagagtcgacctgcaggcatgcccgcggatatcgatgggccccggccgaagcttcaagtttgtacaaaaaagcaggctccggccagaatctcactgactagctaaacagcggccgcatcgagcagctggcttgtggggaccagacaaaaaaggaatggtgcagaattgttaggcgcacctaccaaaagcatctttgcctttattgcaaagataaagcagattcctctagtacaagtggggaacaaaataacgtggaaaagagctgtcctgacagcccactcactaatgcgtatgacgaacgcagtgacgaccacaaaactcgagcaacgagatcatgagccaatcaaagaggagtgatgtagacctaaagcaataatggagccatgacgtaagggcttacgcccatacgaaataattaaaggctgatgtgacctgtcggtctctcagaacctttactttttatgtttggcgtgtatttttaaatttccacggcaatgacgatgtgaccgtcgacccactaaaacattgctttgtcaaaagctaaaaaagatgatgcccgacagccacttgtgtgaagcatgagaagccggtccctccactaagaaaattagtgaagcatcttccagtggtccctccactcacagctcaatcagtgagcaacaggacgaaggaaatgacgtaagccatgacgtctaatcccagggcccggtgaccaatcgaattagcttggcgcgtggaccgaagcttgcatgcctgcagtgcagcgtgacccggtcgtgcccctctctagagataatgagcattgcatgtctaagttataaaaaattaccacatattttttttgtcacacttgtttgaagtgcagtttatctatctttatacatatatttaaactttactctacgaataatataatctatagtactacaataatatcagtgttttagagaatcatataaatgaacagttagacatggtctaaaggacaattgagtattttgacaacaggactctacagttttatctttttagtgtgcatgtgttctcctttttttttgcaaatagcttcacctatataatacttcatccattttattagtacatccatttagggtttagggttaatggtttttatagactaatttttttagtacatctattttattctattttagcctctaaattaagaaaactaaaactctattttagtttttttatttaataatttagatataaaatagaataaaataaagtgactaaaaattaaacaaataccctttaagaaattaaaaaaactaaggaaacatttttcttgtttcgagtagataatgccagcctgttaaacgccgtcgacgagtctaacggacaccaaccagcgaaccagcagcgtcgcgtcgggccaagcgaagcagacggcacggcatctctgtcgctgcctctggacccctctcgagagttccgctccaccgttggacttgctccgctgtcggcatccagaaattgcgtggcggagcggcagacgtgagccggcacggcaggcggcctcctcctcctctcacggcaccggcagctacgggggattcctttcccaccgctccttcgctttcccttcctcgcccgccgtaataaatagacaccccctccacaccctctttccccaacctcgtgttgttcggagcgcacacacacacaaccagatctcccccaaatccacccgtcggcacctccgcttcaaggtacgccgctcgtcctcccccccccccctctctaccttctctagatcggcgttccggtccatgcatggttagggcccggtagttctacttctgttcatgtttgtgttagatccgtgtttgtgttagatccgtgctgctagcgttcgtacacggatgcgacctgtacgtcagacacgttctgattgctaacttgccagtgtttctctttggggaatcctgggatggctctagccgttccgcagacgggatcgatttcatgattttttttgtttcgttgcatagggtttggtttgcccttttcctttatttcaatatatgccgtgcacttgtttgtcgggtcatcttttcatgcttttttttgtcttggttgtgatgatgtggtctggttgggcggtcgttctagatcggagtagaattctgtttcaaactacctggtggatttattaattttggatctgtatgtgtgtgccatacatattcatagttacgaattgaagatgatggatggaaatatcgatctaggataggtatacatgttgatgcgggttttactgatgcatatacagagatgctttttgttcgcttggttgtgatgatgtggtgtggttgggcggtcgttcattcgttctagatcggagtagaatactgtttcaaactacctggtgtatttattaattttggaactgtatgtgtgtgtcatacatcttcatagttacgagtttaagatggatggaaatatcgatctaggataggtatacatgttgatgtgggttttactgatgcatatacatgatggcatatgcagcatctattcatatgctctaaccttgagtacctatctattataataaacaagtatgttttataattattttgatcttgatatacttggatgatggcatatgcagcagctatatgtggatttttttagcactgccttcatacgctatttatttgcttggtactgtttcttttgtcgatgctcaccctgttgtttggtgttacttctgcaggtcgactttaacttagcctaggatccatggacacgttcgggcagcgcacgtcgatttaccgtggcgtgacaaggcatagatggactgggagatatgaggcacatctttgggataacagttgcagaagggaagggcaaactcgtaagggtcgtcaagtctatttaggtggctatgataaagaggagaaagctgctagggcttatgatcttgctgctctgaagtactggggtgccacaacaacaacaaattttccagtgagtaactacgaaaaggagctcgaggacatgaagcacatgacaaggcaggagtttgtagcgtctctgagaaggaagagcagtggtttctccagaggtgcatccatttacaggggagtgactaggcatcaccaacatggaagatggcaagcacggattggacgagttgcagggaacaaggatctttacttgggcaccttcagcacccaggaggaggcagcggaggcgtacgacatcgcggcgatcaagttccgcggcctcaacgccgtcaccaacttcgacatgagccgctacgacgtgaagagcatcctggacagcagcgccctccccatcggcagcgccgccaagcgcctcaaggaggccgaggccgcagcgtccgcgcagcaccaccacgccggcgtggtgagctacgacgtcggccgcatcgcctcgcagctcggcgacggcggagccctggcggcggcgtacggcgcgcactaccacggcgccgcctggccgaccatcgcgttccagccgggcgccgccagcacaggcctgtaccacccgtacgcgcagcagccaatgcgcggcggcgggtggtgcaagcaggagcaggaccacgcggtgatcgcggccgcgcacagcctgcaggacctccaccacctgaacctgggcgcggccggcgcgcacgactttttctcggcagggcagcaggccgccgccgctgcgatgcacggcctgggtagcatcgacagtgcgtcgctcgagcacagcaccggctccaactccgtcgtctacaacggcggggtcggcgacagcaacggcgccagcgccgtcggcggcagtggcggtggctacatgatgccgatgagcgctgccggagcaaccactacatcggcaatggtgagccacgagcaggtgcatgcacgggcctacgacgaagccaagcaggctgctcagatggggtacgagagctacctggtgaacgcggagaacaatggtggcggaggtggaggcggctcgggtggcggaggctccggaggcggtggctcgacgtgcgccaaggacatccaaaaagcagccgcggaggcggcactcgcctttcaggacgagacctgcgacaccaccaccaccaaccacggcctcgacatggaggagaccatggtcgaagccatctacacccccgagcagagcgagggcgccttctacatggacgaagagacaatgttcggcatgccaaccctcctcgacaacatggccgaaggcatgctgctgccgcccccgagcgtccagtggaaccacaactacgacggcgaaggcgacggggatgtgtccctgtggagctactagggtacctgacatcttatagtctgcaacctctcgtgtctgaattcctatctttatcaagtgttattgcttccacgactataggacagctttcgtcgaaagcttttgctcatgtgatctcgaaggattcatctagtctgatttttcgtgacttgtatcggttttattggattcatccaacatatatcaataaaaaatgagttgtgtttcctttcttcctagttcagttaaaattatttccctcctgcgcttgtgctgtaattgtctgtgtacctgttgtttgtgactgtgttagttcccttggatatgatttcgtatttgatatgtacatggagatagcttagcttcattattggagtatgaagttagtatgacatagtcactctcctggaaaattgacactgcaaaccatatttttattctgaaccacaaatcctagtcagtccgctggcatatgccgtccgtttgctgaatccagaacgtgggtttggagatgtacggctgagatgcctctatgcgaaggggatttcgtggtgaaacgagatgggagtagagcaacgcccgtggaagatgcttcaaacttccacacttttgagcaacgatcggcagtagtaaggtagacgatttcaagatcaaagcatatgaagataaacaacatcaacaacaaaatttgttggggttctatagagagaaacagagctacatacatacactgttttgtatctaccatctgagatgatgaaaagatgaaaaactaaagaatgccccggcgccaacgccaggacacgccgcgcgcgcgtcacccgagccatctcttgacccagccggcgctgtatatttacacacgttgcagcatcgatcaccacctgttcgatcgcgtcgccgtcaccggcgcgccgcgacttattgaactagtctagggcgcggctaacaacctagcttagattgccttgtctaaacccttaggctaacgcgccactctagaaggccgatctcccccgaacgcgccagatccgatatcgatgggccctggccgaagcttggtcacccggtccgggcctagaaggccgatctcccgggcacccagctttcttgtacaaagtggccgttaacggatcggccagaatggcccggaccgggttaccccgcggttcaaagccaatgactgttgttaggtccagtttctaaggacgaatcatccaatcactggttctttctgaacaaaacaaagagctatagagttacgttactgtagccgagacagagcctgcaatctggttatgccacatactaggttctttcttaaagttgactcactctatcctaagttctacttacaaggagctacaacaaattggtcataaccggagagcgttcaaggaggtaatatcccatcttactctgtagcaaggctacaaaaggagagctaaagaactaggctacaaaaagagagctaaagaactaactatctagcaagactacagagctatagtgtagagatttcataaccggtgagcgttcaaggatactttgaagagaagaggtaatatctcaactagcaagactacaaaaaaatggagatataaaactaactgtctaacaagactacagagctatagtagagatagatacgttcgacacttaagcatgagaattcgagctcggtaccctggttcacaaactcaatacaacacacagtggagtagggtattacgctccggcggcccgaaccactctaaatccttgtgtcctcgtgtgctcttccaccattaatgactgtaattgcagggacacgaagagttgtagcgcttttgccaacaagatccgctatatgctagtagagtggaacctgcacagcaacaagcatccaataatctgagaataagaattatgtgtggtgatggttctcatctctgcaactcgccattttcgcgagagaaccaaatccaagttggtgaagatcatgatttgggctcatgggctggcatagtagctattacctttgcaattgtggttcgaatctatccgatattctccttttcagggagagctaatgcttatgcttattgggtattttggtttgacactgcttcacgcccaaaaaaaggcaactatgtctgagttggatatggcccaaaaaaaggcagctatgtctgagttggatatggaagtcttctttcgtttagggtgaagtaagaccaagctcatgagcttattatcttaggtcggaacaaattagttgataggcatggcacatttatcaaattataatgattttaacagaaaagcaacacctctttttcagcagcaccagctttgcaagctgcaattgacactccaagcatagtatttgctccaaactcagcctgcatttcgcacaatatcatatctatttccatttggataaaatatattttccagaaatatgggaacagaatcaagatacagaaaaaagttgtggtagtagtggtaagtggaaacacaagtacagtgaaaagatagcattatttctgaacagtcaaattaaccgaaataagtagtatcacatactgcccctaaattgactacacccaatgtaaagaattgcttgagcatattgagccatcagttgtttgtttgtgtaacggatttgacaatgcagagttcaggagcaaaaaaccgcaaaggagagaaagagggaaaggatctcctagtatcccaccttgtggcgcgccctgtcaagtgcatgatggcctggtcgatctgcgtctgctgctgcggttccatcccaacgagtgcctccgacaccttgtcgttgatcacccgcaccgcgtaggcgacccccctggcgaggaacttccgcctctcggaggccccggccgcgtcggcggcggcgccctcgagcgcgcccacgctagccgtagatgctcggtgcacggccttgttggtgtgcaactcgacctcaacggccggtgcgctacgcccgtcaaggatctggcgcgcccgcaccctcgtgatcacggtgggcgcctcccgcctcatgtggccgacgatgaaaagcgccgggttaggggccttggcgcgcaccgccgtattcagggcctcctcgctcttgcgcgagagcaggtgcttccccaggtactcctgcactgacaaggctgccacagcggtggaatttgtcctcacgacttcgccacgtcgtcctcacctccctggcttcccacgactccgccgtatcgaggtgctcggtgggtcgtcttaatccgaagtccgaactaggaagacgagacagagaggtctgaggaatgggcctcgtttgatgttgagctgaattatttttccagcataagcccaggtcttggtccatgaacaaaattactagaaacccagcccagtactacgatctaaaagagggactgccactggatagctctctctagcattctccacgctccaatacagcggcgtcgtgtctatccgggtctatccgcgaacacgtgagaactctccagaaactgctttctcctccacttcatctctctcgctttccctctataaaaagaccccttctaggaattgagggagacagcaagcaccaagcagcgatccgaagctcaatcaattcactcaaacctcttccccaaatcttcgattagatcttcgttgacaagaagactagaaccgaacctgacatgtccaacctgctcacggttcaccagaaccttccggctcttccagtggacgcgacgtccgatgaagtcaggaagaacctcatggacatgttccgcgacaggcaagcgttcagcgagcacacctggaagatgctgctctccgtctgccgctcctgggctgcatggtgcaagctgaacaacaggaagtggttccccgctgagcccgaggacgtgagggattaccttctgtacctgcaagcgcgaggtttgtttctgcttctacctttgatatatatataataattatcattaattagtagtaatataatatttcaaatatttttttcaaaataaaagaatgtagtatatagcaattgcttttctgtagtttataagtgtgtatattttaatttataacttttctaatatatgaccaaaacatggtgatgcctaggtctggcagtgaagaccatccagcaacaccttggacaactgaacatgcttcacaggcgctccggcctcccgcgccccagcgactcgaacgccgtgagcctcgtcatgcgccgcatcaggaaggaaaacgtcgatgccggcgaaagggcaaagcaggccctcgcgttcgagaggaccgatttcgaccaggtccgcagcctgatggagaacagcgacaggtgccaggacattaggaacctggcgttcctcggaattgcatacaacacgctcctcaggatcgcggaaattgcccgcattcgcgtgaaggacattagccgcaccgacggcggcaggatgcttatccacattggcaggaccaagacgctcgtttccaccgcaggcgtcgaaaaggccctcagcctcggagtgaccaagctcgtcgaacgctggatctccgtgtccggcgtcgcggacgacccaaacaactacctcttctgccgcgtccgcaagaacggggtggctgcccctagcgccaccagccaactcagcacgagggccttggaaggtattttcgaggccacccaccgcctgatctacggcgcgaaggatgacagcggtcaacgctacctcgcatggtccgggcactccgcccgcgttggagctgctagggacatggcccgcgccggtgtttccatccccgaaatcatgcaggcgggtggatggacgaacgtgaacattgtcatgaactacattcgcaaccttgacagcgagacgggcgcaatggttcgcctcctggaagatggtgactgaggtacccaacctagacttgtccatcttctggattggccaacttaattaatgtatgaaataaaaggatgcacacatagtgacatgctaatcactataatgtgggcatcaaagttgtgtgttatgtgtaattactagttatctgaataaaagagaaagagatcatccatatttcttatcctaaatgaatgtcacgtgtctttataattctttgatgaaccagatgcatttcattaaccaaatccatatacatataaatattaatcatatataattaatatcaattgggttagcaaaacaaatctagtctaggtgtgttttgcgatccgatatcgaattggccacggtaccagctgctgctgttctagggttcacaagtctgcctatttgtcttccccaatggagctatggttgtctggtctggtccttggtcgtgtcccgtttcattgtgtactatttacctgtaatgtgtatccttaagtctggtttgatggtgtctgaaacgttttgctgtggtagagcagcatggaagaactataatgaataagtgatccctaatcattgtgtccaaattttgcttctgctatacccttttgtgctgtttcttatgttttgcttaaaaatttgatctgacaaacaaatttgtctaaattatgctcttgttctgactgtgtactgtacacatttgtattgctaccggtttggcacatagttttctctttgattgcagatcaaacccttctgattgcagattgcttggctatggctgatgtgctcactgttcttctttagcttgtatattgctgatggtggcttggctacggctgaaaaagttgctgctgcgccgacttggcaactgttgctccagtaatgctttgtcctctcttcctagccgccgacttggcacttggcagctgttgctcctgtaatgcgttgttatctcttatctcttgagatgtactatgattttgaggctgtttgacttgtgccagattgccagtgctgatgctatattatctcaggtttttatgctagtatatgttttactgtgtgctgcctgtgtcgagttacgtaatctattgaaccgctatgcgtgttgatgccctgttgttgcttgccagattgatgcccctgttgcttgcagcttgcaagctgtagtgaaatcctaaaattccaaaccaaatctattctgaacttttgaagatctgtgatgtccggaagaaaagattcaaacagataaacgggactctccagaatctataaaataaatgatcgacaaacgctttgctttggtaggcttcaagcttggtcacccggtccgggcctagaaggccagcttcggccgccccgggcaactttattatacaaagttgatagataaatcagatatctggttcctaaggacccggcggaccgattaaactgattcggtccgacgcgttacctaataacttcgtatagcatacattatacgaagttattagctaactaactagtaagcgtacacctgagcggttaccgaattcctgcccttaaggccaattgttcaagattcattcaacaattgaaacatctcccatgattaaatcagtataaggttgctatggtcttgcttgacaaagtttttttttgagggaatttcaactaaatttttgagtgaaactatcaaatactgattttaaaaaatttttataaaaggaagcgcagagataaaaggccatctatgctacaaaagtacccaaaaatgtaatcctaaagtatgaattgcattttttttttgtttggacgaaaggaaaggagtattaccacaagaatgatatcatcttcatatttagatcttttttgggtaaagcttgagattctctaaatatagagaaatcagaagaaaaaaaaaccgtgttttggtggttttgatttctagcctccacaataactttgacggcgtcgacaagtctaacggacaccaagcagcgaaccaccagcgccgagccaagcgaagcagacggccgagacgttgacaccttcggcgcggcatctctcgagagttccgctccggcgctccacctccaccgctggcggtttcttattccgttccgttccgcctcctgctctgctcctctccacaccacacggcacgaaaccgttacggcaccggcagcacccagcacgggagaggggattcctttcccaccgttccttccctttccgccccgccgctataaatagccagccccatccccagcttttttccccaatctcatctcctctctcctgttgttcggagcacacgcacaatccgatcgatccccaaatccccttcgtctctcctcgcgagcctcgtggatcccagcttcaaggtacggcgatcgatcatcccccctccttctctctaccttcttttctctagactacatcggatggcgatccatggttagggcctgctagtttcccttcctgttttgtcgatggctgcgaggcacaatagatctgatggcgttatgacggctaacttgtcatgttgttgcgatttatagtccctttaggagatcagtttaatttctcggatggttcgagatcggtggtccatggttagtaccctaagatccgcgctgttagggttcgtagatggaggcgacctgttctgattgttaacttgtcagtacctgggaaatcctgggatggttctagctcgtccgcagatgagatcgatttcatgatcctctgtatcttgtttcgttgcctaggttccgtctaatctatccgtggtatgatgtagatgttttgatcgtgctaactacgtcttgtaaagttaattgtcaggtcataatttttagcatgcctttttttttgtttggttttgtctaattgggctgtcgttctagatcagagtagaagactgttccaaactacctgctggatttattgaacttggatctgtatgtgtgtcacatatcttcataaattcatgattaagatggattgaaatatcttttatctttttggtatggatagttctatatgttggtgtggctttgttagatgtatacatgcttagatacatgaagcaacgtgctgctactgtttagtaattgctgttcatttgtctaataaacagataaggatatgtatttatgttgctgttggttttgctggtactttgttggatacaaatgcttcaatacagaaaacagcatgctgctacgatttaccatttatctaatcttatcatatgtctaatctaataaacaaacatgcttttaaattatcttcatatgcttggatgatggcatacacagcggctatgtgtggttttttaaatacccagcatcatgggcatgcatgacactgctttaatatgctttttatttgcttgagactgtttcttttgtttatactgaccctttagttcggtgactcttctgcaggtcgactttaacttagcctaggatccatggcccagtccaagcacggcctgaccaaggagatgaccatgaagtaccgcatggagggctgcgtggacggccacaagttcgtgatcaccggcgagggcatcggctaccccttcaagggcaagcaggccatcaacctgtgcgtggtggagggcggccccttgcccttcgccgaggacatcttgtccgccgccttcatgtacggcaaccgcgtgttcaccgagtacccccaggacatcgtcgactacttcaagaactcctgccccgccggctacacctgggaccgctccttcctgttcgaggacggcgccgtgtgcatctgcaacgccgacatcaccgtgagcgtggaggagaactgcatgtaccacgagtccaagttctacggcgtgaacttccccgccgacggccccgtgatgaagaagatgaccgacaactgggagccctcctgcgagaagatcatccccgtgcccaagcagggcatcttgaagggcgacgtgagcatgtacctgctgctgaaggacggtggccgcttgcgctgccagttcgacaccgtgtacaaggccaagtccgtgccccgcaagatgcccgactggcacttcatccagcacaagctgacccgcgaggaccgcagcgacgccaagaaccagaagtggcacctgaccgagcacgccatcgcctccggctccgccttgccctccggactcagatctcgatagggtaccaatggccagttaacagatccagctgctgctgttctagggttcacaagtctgcctatttgtcttccccaatggagctatggttgtctggtctggtccttggtcgtgtcccgtttcattgtgtactatttacctgtaatgtgtatccttaagtctggtttgatggtgtctgaaacgttttgctgtggtagagcagcatggaagaactataatgaataagtgatccctaatcattgtgtccaaattttgcttctgctatacccttttgtgctgtttcttatgttttgcttaaaaatttgatctgacaaacaaatttgtctaaattatgctcttgttctgactgtgtactgtacacatttgtattgctaccggtttggcacatagttttctctttgattgcagatcaaacccttctgattgcagattgcttggctatggctgatgtgctcactgttcttctttagcttgtatattgctgatggtggcttggctacggctgaaaaagttgctgctgcgccgacttggcaactgttgctccagtaatgctttgtcctctcttcctagccgccgacttggcacttggcagctgttgctcctgtaatgcgttgttatctcttatctcttgagatgtactatgattttgaggctgtttgacttgtgccagattgccagtgctgatgctatattatctcaggtttttatgctagtatatgttttactgtgtgctgcctgtgtcgagttacgtaatctattgaaccgctatgcgtgttgatgccctgttgttgcttgccagattgatgcccctgttgcttgcagcttgcaagctgtagtgaaatcctaaaattcgaaaccaaatctattctgaacttttgaagatctgtgatgtccggaagaaaagattcaaacagataaacgggactctccagaatctataaaataaatgatcgacaaacgctttgctttggtaggcttcctagttagttagcggaccgaagcttcggtccgggcctgcggccgcagatatcagaacctgcgtctggacgcacaagtcatagcattatcggctaaaatttcttaatttctaaattagtcatatcggctaagaaagtggggagcactatcatttcgtagaacaagaacaaggtatcatatatatatatatatataatatttaaactttgttaagtggaatcaaagtgctagtattaatggagtttcatgtgcattaaattttatgtcacatcagcaattttgttgacttggcaaggtcatttagggtgtgtttggaagacaggggctattaggagtattaaacatagtctaattacaaaactaattgcacaaccgctaagctgaatcgcgagatggatctattaagcttaattagtccatgatttgacaatgtggtgctacaataaccatttgctaatgatggattacttaggtttaatagattcgtctcgtgatttagcctatgggttctgctattaattttgtaattagctcatatttagttcttataattagtatccgaacatccaatgtgacatgctaaagtttaaccctggtatccaaatgaagtcttatgagagtttcatcactccggtggtatatgtacttaggctccgttttcttccaccgacttatttttagcacccgtcacattgaatgtttagatactaattagaagtattaaacgtagactatttacaaaatccattacataagacgaatctaaacggcgagacgaatctattaaacctaattagtccatgatttgacaatgtgttgctacagtaaacatttgctaatgatggattaattaggcttaatagattcgtctcgccgtttagcctccacttatgtaatgggttttctaaacaatctacgtttaatactcctaattagtatctaaatattcaatgtgacacgtgctaaaaataagtcagtggaaggaagagaacgtccccttagttttccatcttattaattgtacgatgaaactgtgcagccagatgattgacaatcgcaatacttcaactagtgggccatgcacatcagcgacgtgtaacgtcgtgagttgctgttcccgtagagaaatatcaactggtgggccacgcacatcagcgtcgtgtaacgtggacggaggagccccgtgacggcgtcgacatcgaacggccaccaaccacggaaccacccgtccccacctctcggaagctccgctccacggcgtcgacatctaacggctaccagcaggcgtacgggttggagtggactccttgcctctttgcgctggcggcttccggaaattgcgtggcggagacgaggcgggctcgtctcacacggcacggaagacgtcacgggttccttccccacctctcctcttccccaccgccataaatagccgaccccctcgcctttctccccaatctcatctcgtctcgtgttgttcggagcacaccacccgccccaaatcgttcttcccgcaagcctcggcgatccttcacccgcttcaaggtacggcgatcgtcttcctcctctagatcggcgtgatctgcaagtagttgatttggtagatggttaggatctgtgcactgaagaaatcatgttagatccgcgatgtttctgttcgtagatggctgggaggtggaatttttgtgtagatctgatatgttctcctgtttatcttgtcacgctcctgcgatttgtggggattttaggtcgttgatctgggaatcgtggggttgcttctaggctgttcgtagatgaggtcgttctcacggtttactggatcattgcctagtagatcagctcgggctttcgtctttgtatatggtgcccatacttgcatctatgatctggttccgtggtgttacctaggtttctgcgcctgattcgtccgatcgattttgttagcatgtggtaaacgtttggtcatggtctgatttagattagagtcgaataggatgatctcgatctagctcttgggattaatatgcatgtgtcaccaatctgttccgtggttaagatgatgaatctatgcttagttaatgggtgtagatatatatgctgctgttcctcaatgatgccgtagcttttacctgagcagcatggatcgtcctgttacttaggtagatgcacatgcttatagatcaagatatgtactgctactgttggaattctttagtatacctgatgatcatccatgctcttgttacttgttttggtatacttggatgatggcatgctgctgctttttgttgatttgagcccatccatatctgcatatgtcacatgattaagatgattacgctgtttctgtatgatgccatagcttttatgtgagcaacatgcatcctcctggttatatgcattaatagatggaagatatctattgctacaatttgatgattattttgtacatacgatgatcaagcatgctcttcatactttgttgatatacttggataatgaaatgctgctgcacgttcattctatagcactaatgatgtgatgaacacgcacgacctgtttgtggcatctgtttgaatgtgttgttgctgttcactagagactgttttattaacctactgctagatacttacccttctgtctgtttattcttttgcagccagaatagcggatccgcccatggtcgaacaggacggcctgcatgcaggatcaccagcggcctgggtcgaaagactcttcggctacgactgggcacaacagaccatcgggtgtagcgacgcagctgttttcaggctgtccgcacagggcagacccgttttgttcgtcaaaacagacctgtctggcgcgctcaacgaactgcaagacgaggccgcaagactgagctggcttgctaccacaggcgttccttgtgctgcagtcctcgacgtcgttactgaggctggaagagactggctgctcctgggtgaagtcccaggacaggaccttttgtccagccatctggcacctgccgaaaaggtcagcatcatggcagacgccatgagaaggctgcacacactcgaccctgcaacatgccccttcgatcaccaggcaaaacacaggatcgagcgcgcaagaacgcgcatggaggctggtttggtcgaccaagatgacctcgacgaggaacaccaaggactggctcctgctgaactcttcgccagactcaaggcgagaatgccagacggtgacgacctggtcgtcacacacggcgacgcttgtctcccaaacataatggtcgagaacggacgcttcagcggtttcatcgactgcggtagactcggagtcgctgacagataccaggacatcgccctggcaacacgcgacatcgcagaggaactcggaggcgaatgggctgacaggtttctcgtgctctacggtatcgctgctccagacagccagaggatcgcattctacaggctcctcgacgagttcttttagttcgaacggtacccggggatcctctagtgccgtgggtcgtttaagctgccgctgtacctgtgtcgtctggtgccttctggtgtacctgggaggttgtcgtctatcaagtatctgtggttggtgtcatgagtcagtgagtcccaatactgttcgtgtcctgtgtgcattatacccaaaactgttatgggcaaatcatgaataagcttgatgttcgaacttaaaagtctctgctcaatatggtattatggttgtttttgttcgtctcctaatatttgcctgggatcaaattttattggctggtgttcatttgacctccatgttcttgctaggctccattttttactctacagccataatatgtttgattgtttggtttgttctttgttgtacacctggttctgtcgagcttagttttcgacactggcttacagcttaacatgttgctattttattgggttctgattgctattttattgggttctgattgctagtttttgctgaatccaaaaaccatgttatttatttaagcgatccaggttattattatgatggtggctaagtttttttttttccaagggtaaattttctggattctccagtgtttctgtggccgaattcaatcactagagtcgacctgcatgattccgatgacttcgtaggttcctagctcaagccgctcgtgtccaagcgtcacttacgattagctaatgattacggcatctaggaccgactagctagctagctaagagctcggtaccgagctcgaattcattccgattaatcgtggcctcttgctcttcaggatgaagagctatgtttaaacgtgcaagcgctactagacaattcagtacattaaaaacgtccgcaatgtgttattaagttgtctaagcgtcaatttgtttacaccacaatatatcctgcca